(19) United States
(12) Patent Application Publication
(10) Pub. No.: US 2026/0184815 A1
(43) Pub. Date: Jul. 2, 2026

(54) PLASMA KALLIKREIN BINDING PROTEINS

(71) Applicant: Takeda Pharmaceutical Company Limited, Osaka (JP)

(72) Inventors: Daniel J. Sexton, Melrose, MA (US); Malini Viswanathan, Acton, MA (US)

(73) Assignee: Takeda Pharmaceutical Company Limited, Osaka (JP)

(21) Appl. No.: 19/328,948

(22) Filed: Sep. 15, 2025

Related U.S. Application Data
(63) Continuation of application No. 17/842,999, filed on Jun. 17, 2022, now abandoned.
Application No. 17/842,999 is a continuation of application No. 16/445,304, filed on Jun. 19, 2019, now Pat. No. 11,401,346.
Application No. 16/445,304 is a continuation of application No. 14/969,498, filed on Dec. 15, 2015, now Pat. No. 10,370,453.
Application No. 14/969,498 is a division of application No. 14/310,814, filed on Jun. 20, 2014, now Pat. No. 9,266,964.
Application No. 14/310,814 is a division of application No. 13/345,170, filed on Jan. 6, 2012, now Pat. No. 8,816,055.
(60) Provisional application No. 61/430,442, filed on Jan. 6, 2011.

(51) Int. Cl. C07K 16/40; A61K 39/00; G01N 33/573

(52) U.S. Cl. CPC C07K 16/40; G01N 33/573; A61K 2039/505; C07K 2317/34; C07K 2317/55; C07K 2317/56; C07K 2317/565; C07K 2317/76; C07K 2317/92; C07K 2317/94; G01N 2333/96455; G01N 2500/04

(57) ABSTRACT

Plasma kallikrein binding proteins and methods of using such proteins are described.

### RELATED APPLICATIONS

[0001] This application is a continuation of U.S. application Ser. No. 17/842,999, which is a continuation of U.S. application Ser. No. 16/445,304, filed Jun. 19, 2019, and issued as U.S. Pat. No. 11,401,346, which is a continuation of U.S. application Ser. No. 14/969,498, filed on Dec. 15, 2015 and issued as U.S. Pat. No. 10,370,453, which is a divisional application of U.S. Ser. No. 14/310,814, filed on Jun. 20, 2014 and issued as U.S. Pat. No. 9,266,964, which is a divisional application of U.S. Ser. No. 13/345,170, filed on Jan. 6, 2012 and issued as U.S. Pat. No. 8,816,055, which claims priority to U.S. Application Ser. No. 61/430,442, filed on Jan. 6, 2011. The content of each of the prior applications is incorporated by reference herein in their entirety.

### REFERENCE TO AN ELECTRONIC SEQUENCE LISTING

[0002] The contents of the electronic sequence listing (D061770042US06-SEQ-EMB.xml; Size: 3,313,703 bytes; and Date of Creation: Sep. 15, 2025) are herein incorporated by reference in their entirety.

### BACKGROUND

[0003] Plasma kallikrein is a serine protease. Prekallikrein is the precursor of plasma kallikrein.

### SUMMARY

[0004] Plasma kallikrein is a serine protease component of the contact system and a potential drug target for different inflammatory, cardiovascular, infectious (sepsis) and oncology diseases (Sainz I. M. et al., Thromb Haemost 98, 77-83, 2007). The contact system is activated by either factor XIIa upon exposure to foreign or negatively charged surfaces or on endothelial cell surfaces by prolylcarboxypeptidases (FIG. 1) (Sainz I. M. et al., Thromb Haemost 98, 77-83, 2007). Activation of the plasma kallikrein amplifies intrinsic coagulation via its feedback activation of factor XII and enhances inflammation via the production of the proinflammatory nonapeptide bradykinin. As the primary kininogenase in the circulation, plasma kallikrein is largely responsible for the generation of bradykinin in the vasculature. A genetic deficiency in the C1-inhibitor protein (C1-INH), the major natural inhibitor of plasma kallikrein, leads to hereditary angioedema (HAE). Patients with HAE suffer from acute attacks of painful edema often precipitated by unknown triggers (Zuraw B. L. et al., N Engl J Med 359, 1027-1036, 2008). Through the use of pharmacological agents or genetic studies in animal models, the plasma kallikrein-kinin system (plasma KKS) has been implicated in various diseases.

[0005] Plasma kallikrein binding proteins (e.g., antibodies, e.g., inhibitory antibodies) are useful therapeutic agents for a variety of diseases and conditions, e.g., diseases and conditions that involve plasma kallikrein activity, due to their high potency, specificity, and prolonged serum residency. High potency can translate to efficacy and a low drug dosage, and high specificity can reduce side effects due to the inhibition of related off target serine proteases. In general, small molecule serine proteases are not as specific as antibody inhibitors. Prolonged serum residency can permit infrequent dosing.

[0006] In some aspects, the disclosure features an isolated protein (e.g., antibody, e.g., human antibody) that binds to the active form of plasma kallikrein (e.g., human plasma kallikrein and/or mouse plasma kallikrein), and, e.g., does not bind preplasma kallikrein (e.g., human preplasma kallikrein and/or mouse preplasma kallikrein).

[0007] In some embodiments, the plasma kallikrein binding protein binds the same epitope or competes for binding with a kallikrein binding protein described herein. In some embodiments, the plasma kallikrein binding protein binds the same epitope or competes for binding with a protein (e.g., epi-Kal2) and/or a small molecule (e.g., AEBSF) described herein and does not bind pre-plasma kallikrein.

[0008] In some embodiments, the protein described herein is selected from the group consisting of M162-A04, M199-A08, M160-G12, M142-H08, X63-G06, X101-A01 (also referred to herein as DX-2922), X81-B01, X67-D03, X67-G04, X115-B07, X115-D05, X115-E09, X115-H06, X115-A03, X115-D01, X115-F02, X124-G01 (also referred to herein as DX-2930), X115-G04, M29-D09, M145-D11, M06-D09 and M35-G04.

[0009] In some embodiments, the plasma kallikrein binding protein competes with or binds the same epitope as X81-B01 and, e.g., does not bind pre-plasma kallikrein.

[0010] In some embodiments, the plasma kallikrein binding protein competes with or binds the same epitope as X67-D03 and, e.g., does not bind pre-plasma kallikrein.

[0011] In some embodiments, the plasma kallikrein binding protein competes with or binds to the same site as X101-A01 and, e.g., does not bind pre-plasma kallikrein.

[0012] In some embodiments, the plasma kallikrein binding protein competes with or binds to the same site as M162-A04 and, e.g., does not bind pre-plasma kallikrein.

[0013] In some embodiments, the plasma kallikrein binding protein competes with or binds to the same site as X115-F02 and, e.g., does not bind pre-plasma kallikrein.

[0014] In some embodiments, the plasma kallikrein binding protein competes with or binds to the same site as X124-G01 and, e.g., does not bind pre-plasma kallikrein.

[0015] In some embodiments, the plasma kallikrein binding protein competes with or binds to the same site as X63-G06 and, e.g., does not bind pre-plasma kallikrein.

[0016] In some embodiments, the plasma kallikrein binding protein does not bind prekallikrein (e.g., human prekallikrein and/or mouse prekallikrein), but binds to the active form of plasma kallikrein (e.g., human plasma kallikrein and/or mouse plasma kallikrein).

[0017] In certain embodiments, the protein binds at or near the active site of the catalytic domain of plasma kallikrein, or a fragment thereof, or binds an epitope that overlaps with the active site of plasma kallikrein and, e.g., does not bind pre-plasma kallikrein.

[0018] In some embodiments, the protein binds to one or more amino acids that form the catalytic triad of plasma kallikrein: His434, Asp483, and/or Ser578 (numbering based on the human sequence) and, e.g., does not bind pre-plasma kallikrein.

[0019] In some embodiments, the protein binds to one or more amino acids of: Ser479, Tyr563, and/or Asp585 (numbering based on the human sequence) and, e.g., does not bind pre-plasma kallikrein.

[0020] In some embodiments, the plasma kallikrein binding protein binds one or more amino acids of: Arg551, Gln553, Tyr555, Thr558, and/or Arg560 (numbering based on the human kallikrein sequence). In other embodiments, the plasma kallikrein binding protein binds two, three, four or five (i.e., all) amino acids of: Arg551, Gln553, Tyr555, Thr558, and/or Arg560 (numbering based on the human sequence) and, e.g., does not bind pre-plasma kallikrein.

[0021] In some embodiments, the plasma kallikrein binding protein binds one or more amino acids of: S478, N481, S525, and K526 (numbering based on the human kallikrein sequence). In other embodiments, the plasma kallikrein binding protein binds two, three or four (i.e., all) amino acids of: S478, N481, S525, and K526 (numbering based on the human kallikrein sequence).

[0022] In some embodiments, the plasma kallikrein binding protein decreases Factor XIIa and/or bradykinin production by greater than about 5%, about 10%, about 15%, about 20%, about 25%, about 30%, about 35%, about 40%, about 45%, about 50%, about 55%, about 60%, about 65%, about 70%, about 75%, about 80%, about 85%, about 90%, or about 95% as compared to a standard, e.g., the Factor XIIa and/or bradykinin production under the same conditions but in the absence of the protein.

[0023] In some embodiments, the plasma kallikrein binding protein has an apparent inhibition constant (K_{i,app}) of less than 1000, 500, 100, 10, 1, 0.5 or 0.2 nM.

[0024] In one embodiment, the HC and LC variable domain sequences are components of the same polypeptide chain.

[0025] In another embodiment, the HC and LC variable domain sequences are components of different polypeptide chains. For example, the plasma kallikrein binding protein is an IgG, e.g., IgG1, IgG2, IgG3, or IgG4. The plasma kallikrein binding protein can be a soluble Fab (sFab).

[0026] In some embodiments, the plasma kallikrein binding protein has a serum residence time of 1 week, 2 weeks, 3 weeks, 4 weeks, 5 weeks or more, in vivo, e.g., in humans. In one embodiment, the plasma kallikrein binding protein is an IgG, e.g., an IgG1, IgG2, IgG3 or IgG4, that has a serum residence time of 1 week, 2 weeks, 3 weeks, 4 weeks, 5 weeks or more in vivo, e.g., in humans.

[0027] In some embodiments, the plasma kallikrein binding protein is physically associated with a moiety that improves serum residence time, e.g., a moiety described herein. In one embodiment, the plasma kallikrein binding protein is modified to include, e.g., PEGylation, fusion to serum albumin (e.g., human serum albumin), conjugation to human serum albumin, HESylation (HESylation utiliseshydroxyethyl starch (“HES”) derivatives linked to drug substances in order to modify the drug characteristics or fusion to a unstructured recombinant polymer (URPs).

[0028] In other embodiments, the plasma kallikrein binding protein includes a Fab2′, scFv, minibody, scFv::Fc fusion, Fab::HSA fusion, HSA::Fab fusion, Fab::HSA::Fab fusion, or other molecule that comprises the antigen combining site of one of the binding proteins herein. The VH and VL regions of these Fabs can be provided as IgG, Fab, Fab2, Fab2′, scFv, PEGylated Fab, PEGylated scFv, PEGylated Fab2, VH::CH1::HSA+LC, HSA::VH::CH1+LC, LC::HSA+VH::CH1, HSA::LC+VH::CH1, or other appropriate construction.

[0029] In one embodiment, the plasma kallikrein binding protein is a human or humanized antibody or is non-immunogenic in a human. For example, the protein includes one or more human antibody framework regions, e.g., all human framework regions.

[0030] In one embodiment, the plasma kallikrein binding protein includes a human Fc domain, or an Fc domain that is at least 95, 96, 97, 98, or 99% identical to a human Fc domain.

[0031] In one embodiment, the plasma kallikrein binding protein is a primate or primatized antibody or is non-immunogenic in a human. For example, the protein includes one or more primate antibody framework regions, e.g., all primate framework regions.

[0032] In one embodiment, the plasma kallikrein binding protein includes a primate Fc domain, or an Fc domain that is at least 95, 96, 97, 98, or 99% identical to a primate Fc domain. “Primate” includes humans (Homo sapiens), chimpanzees (Pan troglodytes and Pan paniscus (bonobos)), gorillas (Gorilla gorilla), gibons, monkeys, lemurs, aye-ayes (Daubentonia madagascariensis), and tarsiers.

[0033] In one embodiment, the plasma kallikrein binding protein includes human framework regions, or framework regions that are at least 95, 96, 97, 98, or 99% identical to human framework regions.

[0034] In certain embodiments, the plasma kallikrein binding protein includes no sequences from mice or rabbits (e.g., is not a murine or rabbit antibody).

[0035] In certain embodiments, the plasma kallikrein binding protein is capable of binding to a cell or tissue, e.g., that expresses plasma kallikrein.

[0036] In one embodiment, the plasma kallikrein binding protein is physically associated with a nanoparticle, and can be used to guide a nanoparticle to a cell or tissue expressing plasma kallikrein.

[0037] In some aspects, the disclosure features an isolated protein (e.g., antibody, e.g., human antibody) that binds the same epitope or competes for binding with a kallikrein binding protein described herein.

[0038] In some embodiments, the protein binds the same epitope or competes for binding with a protein (e.g., epi-Kal2) and/or a small molecule (e.g., AEBSF) described herein.

[0039] In some embodiments, the isolated protein comprises a heavy chain immunoglobulin variable domain sequence and a light chain immunoglobulin variable domain sequence, wherein:
[0040] the heavy chain immunoglobulin variable domain sequence comprises one, two, or three (e.g., three) CDR regions from the heavy chain variable domain of a protein described herein, and/or
[0041] the light chain immunoglobulin variable domain sequence comprises one, two, or three (e.g., three) CDR regions from the light chain variable domain of a protein described herein,
[0042] wherein the protein binds to plasma kallikrein.

[0043] In some embodiments, the heavy chain immunoglobulin variable domain sequence comprises one, two, or three (e.g., three) CDR regions from the heavy chain variable domain of M162-A04, M199-A08, M160-G12, M142-H08, X63-G06, X101-A01, X81-B01, X67-D03, X67-G04, X115-B07, X115-D05, X115-E09, X115-H06, X115-A03, X115-D01, X115-F02, X124-G01, X115-G04, M29-D09, M145-D11, M06-D09 and M35-G04.
[0044] the light chain immunoglobulin variable domain sequence comprises one, two, or three (e.g., three) CDR regions from the light chain variable domain of M162-A04, M199-A08, M160-G12, M142-H08, X63-G06, X101-A01, X81-B01, X67-D03, X67-G04, X115-B07, X115-D05, X115-E09, X115-H06, X115-A03, X115-D01, X115-F02, X124-G01, X115-G04, M29-D09, M145-D11, M06-D09 and M35-G04 (respectively).

[0045] In some embodiments, the protein inhibits plasma kallikrein (e.g., human plasma kallikrein and/or mouse plasma kallikrein).

[0046] In some embodiments, the one, two, or three (e.g., three) CDR regions from the heavy chain variable domain are from X81-B01 and/or the one, two, or three (e.g., three) CDR regions from the light chain variable domain are from X81-B01.

[0047] In some embodiments, the one, two, or three (e.g., three) CDR regions from the heavy chain variable domain are from X67-D03 and/or the one, two, or three (e.g., three) CDR regions from the light chain variable domain are from X67-D03.

[0048] In some embodiments, the one, two, or three (e.g., three) CDR regions from the heavy chain variable domain are from X63-G06 and/or the one, two, or three (e.g., three) CDR regions from the light chain variable domain are from X63-G06.

[0049] In some embodiments, the one, two, or three (e.g., three) CDR regions from the heavy chain variable domain are from M162-A04 and/or the one, two, or three (e.g., three) CDR regions from the light chain variable domain are from MJ162-A04.

[0050] In some embodiments, the one, two, or three (e.g., three) CDR regions from the heavy chain variable domain are from X115-F02 and/or the one, two, or three (e.g., three) CDR regions from the light chain variable domain are from X115-F02.

[0051] In some embodiments, the one, two, or three (e.g., three) CDR regions from the heavy chain variable domain are from X124-G01 and/or the one, two, or three (e.g., three) CDR regions from the light chain variable domain are from X124-G01.

[0052] In some embodiments, the heavy chain immunoglobulin variable domain sequence comprises the heavy chain variable domain of a protein described herein, and/or the light chain immunoglobulin variable domain sequence comprises the light chain variable domain of a protein described herein.

[0053] In some embodiments, the heavy chain immunoglobulin variable domain sequence comprises the heavy chain variable domain of M162-A04, M199-A08, M160-G12, M142-H08, X63-G06, X101-A01, X81-B01, X67-D03, X67-G04, X115-B07, X115-D05, X115-E09, X115-H06, X115-A03, X115-D01, X115-F02, X124-G01, X115-G04, M29-D09, M145-D11, M06-D09 and M35-G04, and/or the light chain immunoglobulin variable domain sequence comprises the light chain variable domain of M162-A04, M199-A08, M160-G12, M142-H08, X63-G06, X101-A01, X81-B01, X67-D03, X67-G04, X115-B07, X115-D05, X115-E09, X115-H06, X115-A03, X115-D01, X115-F02, X124-G01, X115-G04, M29-D09, M145-D11, M06-D09 and M35-G04 (respectively).

[0054] In some embodiments, the heavy chain immunoglobulin variable domain sequence comprises the heavy chain variable domain of X81-B01, and/or the light chain immunoglobulin variable domain sequence comprises the light chain variable domain of X81-B01.

[0055] In some embodiments, the heavy chain immunoglobulin variable domain sequence comprises the heavy chain variable domain of X67-D03, and/or the light chain immunoglobulin variable domain sequence comprises the light chain variable domain of X67-D03.

[0056] In some embodiments, the protein comprises the heavy chain of a protein described herein, and/or the light chain of a protein described herein.

[0057] In some embodiments, the protein comprises the heavy chain of M162-A04, M199-A08, M160-G12, M142-H08, X63-G06, X101-A01, X81-B01, X67-D03, X67-G04, X115-B07, X115-D05, X115-E09, X115-H06, X115-A03, X115-D01, X115-F02, X124-G01, X115-G04, M29-D09, M145-D11, M06-D09 and M35-G04.
[0058] and/or the light chain of M162-A04, M199-A08, M160-G12, M142-H08, X63-G06, X101-A01, X81-B01, X67-D03, X67-G04, X115-B07, X115-D05, X115-E09, X115-H06, X115-A03, X115-D01, X115-F02, X124-G01, X115-G04, M29-D09, M145-D11, M06-D09 and M35-G04 (respectively).

[0059] In some embodiments, the protein comprises the heavy chain of X81-B01, and/or the light chain of X81-B01.

[0060] In some embodiments, the protein comprises the heavy chain of X67-D03, and/or the light chain of X67-D03.

[0061] In some embodiments, the protein comprises the heavy chain of M162-A04, and/or the light chain of M162-A04.

[0062] In some embodiments, the protein comprises the heavy chain of X115-F02, and/or the light chain of X115-F02.

[0063] In some embodiments, the protein comprises the heavy chain of X124-G01, and/or the light chain of X124-G01.

[0064] In some embodiments, the plasma kallikrein binding protein does not bind prekallikrein (e.g., human prekallikrein and/or mouse prekallikrein), but binds to the active form of plasma kallikrein (e.g., human plasma kallikrein and/or mouse plasma kallikrein).

[0065] In some embodiments, the plasma kallikrein binding protein decreases Factor XIIa and/or bradykinin production by greater than about 5%, about 10%, about 15%, about 20%, about 25%, about 30%, about 35%, about 40%, about 45%, about 50%, about 55%, about 60%, about 65%, about 70%, about 75%, about 80%, about 85%, about 90%, or about 95% as compared to a standard, e.g., the Factor XIIa and/or bradykinin production under the same conditions but in the absence of the protein.

[0066] In some embodiments, the protein includes one or more of the following characteristics: (a) a human CDR or human framework region; (b) the HC immunoglobulin variable domain sequence comprises one or more (e.g., 1, 2, or 3) CDRs that are at least 85, 88, 89, 90, 91, 92, 93, 94, 95, 96, 97, 98, 99, or 100% identical to a CDR of a HC variable domain described herein; (c) the LC immunoglobulin variable domain sequence comprises one or more (e.g., 1, 2, or 3) CDRs that are at least 85, 88, 89, 90, 91, 92, 93, 94, 95, 96, 97, 98, 99, or 100% identical to a CDR of a LC variable domain described herein; (d) the LC immunoglobulin variable domain sequence is at least 85, 88, 89, 90, 91, 92, 93, 94, 95, 96, 97, 98, 99, or 100% identical to a LC variable domain described herein (e.g., overall or in framework regions or CDRs); (e) the HC immunoglobulin variable domain sequence is at least 85, 88, 89, 90, 91, 92, 93, 94, 95, 96, 97, 98, 99, or 100% identical to a HC variable domain described herein (e.g., overall or in framework regions or CDRs); (f) the protein binds an epitope bound by a protein described herein, or competes for binding with a protein described herein; (g) a primate CDR or primate framework region; (h) the HC immunoglobulin variable domain sequence comprises a CDR1 that differs by at least one amino acid but by no more than 2 or 3 amino acids from the CDR1 of a HC variable domain described herein; (i) the HC immunoglobulin variable domain sequence comprises a CDR2 that differs by at least one amino acid but by no more than 2, 3, 4, 5, 6, 7, or 8 amino acids from the CDR2 of a HC variable domain described herein; (j) the HC immunoglobulin variable domain sequence comprises a CDR3 that differs by at least one amino acid but by no more than 2, 3, 4, 5, or 6 amino acids from the CDR3 of a HC variable domain described herein; (k) the LC immunoglobulin variable domain sequence comprises a CDR1 that differs by at least one amino acid but by no more than 2, 3, 4, or 5 amino acids from the CDR1 of a LC variable domain described herein; (l) the LC immunoglobulin variable domain sequence comprises a CDR2 that differs by at least one amino acid but by no more than 2, 3, or 4 amino acids from the CDR2 of a LC variable domain described herein; (m) the LC immunoglobulin variable domain sequence comprises a CDR3 that differs by at least one amino acid but by no more than 2, 3, 4, or 5 amino acids from the CDR3 of a LC variable domain described herein; (n) the LC immunoglobulin variable domain sequence differs by at least one amino acid but by no more than 2, 3, 4, 5, 6, 7, 8, 9, or 10 amino acids from a LC variable domain described herein (e.g., overall or in framework regions or CDRs); and (o) the HC immunoglobulin variable domain sequence differs by at least one amino acid but by no more than 2, 3, 4, 5, 6, 7, 8, 9, or 10 amino acids from a HC variable domain described herein (e.g., overall or in framework regions or CDRs).

[0067] In some embodiments, the protein has an apparent inhibition constant (K_{i,app}) of less than 1000, 500, 100, 10, 1, 0.5 or 0.2 nM.

[0068] In some embodiments, the antibody does not bind prekallikrein (e.g., human prekallikrein and/or mouse prekallikrein), but binds to the active form of plasma kallikrein (e.g., human plasma kallikrein and/or mouse plasma kallikrein).

[0069] In a preferred embodiment, the protein is an antibody (e.g., a human antibody) having the light and heavy chains of antibodies selected from the group consisting of M162-A04, M199-A08, M160-G12, M142-H08, X63-G06, X101-A01, X81-B01, X67-D03, X67-G04, X115-B07, X115-D05, X115-E09, X115-H06, X115-A03, X115-D01, X115-F02, X124-G01, X115-G04, M29-D09, M145-D11, M06-D09 and M35-G04.

[0070] In a preferred embodiment, the protein is an antibody (e.g., a human antibody) having the heavy chain of an antibody selected from the group consisting of: M162-A04, M199-A08, M160-G12, M142-H08, X63-G06, X101-A01, X81-B01, X67-D03, X67-G04, X115-B07, X115-D05, X115-E09, X115-H06, X115-A03, X115-D01, X115-F02, X124-G01, X115-G04, M29-D09, M145-D11, M06-D09 and M35-G04.

[0071] In a preferred embodiment, the protein is an antibody (e.g., a human antibody) having the light chain of an antibody selected from the group consisting of: M162-A04, M199-A08, M160-G12, M142-H08, X63-G06, X101-A01, X81-B01, X67-D03, X67-G04, X115-B07, X115-D05, X115-E09, X115-H06, X115-A03, X115-D01, X115-F02, X124-G01, X115-G04, M29-D09, M145-D11, M06-D09 and M35-G04.

[0072] In a preferred embodiment, the protein is an antibody (e.g., a human antibody) having light and heavy antibody variable regions of an antibody selected from the group consisting of M162-A04, M199-A08, M160-G12, M142-H08, X63-G06, X101-A01, X81-B01, X67-D03, X67-G04, X115-B07, X115-D05, X115-E09, X115-H06, X115-A03, X115-D01, X115-F02, X124-G01, X115-G04, M29-D09, M145-D11, M06-D09 and M35-G04.

[0073] In a preferred embodiment, the protein is an antibody (e.g., a human antibody) having a heavy chain antibody variable region of an antibody selected from the group consisting of: M162-A04, M199-A08, M160-G12, M142-H08, X63-G06, X101-A01, X81-B01, X67-D03, X67-G04, X115-B07, X115-D05, X115-E09, X115-H06, X115-A03, X115-D01, X115-F02, X124-G01, X115-G04, M29-D09, M145-D11, M06-D09 and M35-G04.

[0074] In a preferred embodiment, the protein is an antibody (e.g., a human antibody) having a light chain antibody variable region of an antibody selected from the group consisting of: M162-A04, M199-A08, M160-G12, M142-H08, X63-G06, X101-A01, X81-B01, X67-D03, X67-G04, X115-B07, X115-D05, X115-E09, X115-H06, X115-A03, X115-D01, X115-F02, X124-G01, X115-G04, M29-D09, M145-D11, M06-D09 and M35-G04.

[0075] In a preferred embodiment, the protein is an antibody (e.g., a human antibody) having one or more (e.g., 1, 2, or 3) heavy chain CDRs selected from the corresponding CDRs of the group of heavy chains consisting of M162-A04, M199-A08, M160-G12, M142-H08, X63-G06, X101-A01, X81-B01, X67-D03, X67-G04, X115-B07, X115-D05, X115-E09, X115-H06, X115-A03, X115-D01, X115-F02, X124-G01, X115-G04, M29-D09, M145-D11, M06-D09 and M35-G04.

[0076] In a preferred embodiment, the protein is an antibody (e.g., a human antibody) having one or more (e.g., 1, 2, or 3) light chain CDRs selected from the corresponding CDRs of the group of light chains consisting of M162-A04, M199-A08, M160-G12, M142-H08, X63-G06, X101-A01, X81-B01, X67-D03, X67-G04, X115-B07, X115-D05, X115-E09, X115-H06, X115-A03, X115-D01, X115-F02, X124-G01, X115-G04, M29-D09, M145-D11, M06-D09 and M35-G04.

[0077] In a preferred embodiment, the protein is an antibody (e.g., a human antibody) having one or more (e.g., 1, 2, or 3) heavy chain CDRs selected from the corresponding CDRs of the group of heavy chains consisting of M162-A04, M199-A08, M160-G12, M142-H08, X63-G06, X101-A01, X81-B01, X67-D03, X67-G04, X115-B07, X115-D05, X115-E09, X115-H06, X115-A03, X115-D01, X115-F02, X124-G01, X115-G04, M29-D09, M145-D11, M06-D09 and M35-G04.
[0078] and one or more (e.g., 1, 2, or 3) light chain CDRs selected from the corresponding CDRs of the group of light chains consisting of M162-A04, M199-A08, M160-G12, M142-H08, X63-G06, X101-A01, X81-B01, X67-D03, X67-G04, X115-B07, X115-D05, X115-E09, X115-H06, X115-A03, X115-D01, X115-F02, X124-G01, X115-G04, M29-D09, M145-D11, M06-D09 and M35-G04 (respectively).

[0079] In a preferred embodiment, the protein is an antibody (e.g., a human antibody) having the light and heavy chains of X81-B01.

[0080] In a preferred embodiment, the protein is an antibody (e.g., a human antibody) having the heavy chain of X81-B01.

[0081] In a preferred embodiment, the protein is an antibody (e.g., a human antibody) having the light chain of X81-B01.

[0082] In a preferred embodiment, the protein is an antibody (e.g., a human antibody) having light and heavy antibody variable regions of an antibody selected from X81-B01.

[0083] In a preferred embodiment, the protein is an antibody (e.g., a human antibody) having a heavy chain antibody variable region of X81-B01.

[0084] In a preferred embodiment, the protein is an antibody (e.g., a human antibody) having a light chain antibody variable region of X81-B01.

[0085] In a preferred embodiment, the protein is an antibody (e.g., a human antibody) having one or more (e.g., 1, 2, or 3) heavy chain CDRs from the corresponding CDRs of the heavy chain of X81-B01.

[0086] In a preferred embodiment, the protein is an antibody (e.g., a human antibody) having one or more (e.g., 1, 2, or 3) light chain CDRs from the corresponding CDRs of the light chain of X81-B01.

[0087] In a preferred embodiment, the protein is an antibody (e.g., a human antibody) having one or more (e.g., 1, 2, or 3) heavy chain CDRs from the heavy chain of X81-B01 and one or more (e.g., 1, 2, or 3) light chain CDRs from the corresponding CDRs of the light chain of X81-B01.

[0088] In a preferred embodiment, the protein is an antibody (e.g., a human antibody) having the light and heavy chains of X67-D03.

[0089] In a preferred embodiment, the protein is an antibody (e.g., a human antibody) having the heavy chain of X67-D03.

[0090] In a preferred embodiment, the protein is an antibody (e.g., a human antibody) having the light chain of X67-D03.

[0091] In a preferred embodiment, the protein is an antibody (e.g., a human antibody) having light and heavy antibody variable regions of an antibody selected from X67-D03.

[0092] In a preferred embodiment, the protein is an antibody (e.g., a human antibody) having a heavy chain antibody variable region of X67-D03.

[0093] In a preferred embodiment, the protein is an antibody (e.g., a human antibody) having a light chain antibody variable region of X67-D03.

[0094] In a preferred embodiment, the protein is an antibody (e.g., a human antibody) having one or more (e.g., 1, 2, or 3) heavy chain CDRs from the corresponding CDRs of the heavy chain of X67-D03.

[0095] In a preferred embodiment, the protein is an antibody (e.g., a human antibody) having one or more (e.g., 1, 2, or 3) light chain CDRs from the corresponding CDRs of the light chain of X67-D03.

[0096] In a preferred embodiment, the protein is an antibody (e.g., a human antibody) having one or more (e.g., 1, 2, or 3) heavy chain CDRs from the heavy chain of X67-D03 and one or more (e.g., 1, 2, or 3) light chain CDRs from the corresponding CDRs of the light chain of X67-D03.

[0097] In a preferred embodiment, the protein is an antibody (e.g., a human antibody) having the light and heavy chains of X124-G01 or X115-F02.

[0098] In a preferred embodiment, the protein is an antibody (e.g., a human antibody) having the heavy chain of X124-G01 or X115-F02.

[0099] In a preferred embodiment, the protein is an antibody (e.g., a human antibody) having the light chain of X124-G01 or X115-F02.

[0100] In a preferred embodiment, the protein is an antibody (e.g., a human antibody) having light and heavy antibody variable regions of an antibody selected from X124-G01 or X115-F02.

[0101] In a preferred embodiment, the protein is an antibody (e.g., a human antibody) having a heavy chain antibody variable region of X124-G01 or X115-F02.

[0102] In a preferred embodiment, the protein is an antibody (e.g., a human antibody) having a light chain antibody variable region of X124-G01 or X115-F02.

[0103] In a preferred embodiment, the protein is an antibody (e.g., a human antibody) having one or more (e.g., 1, 2, or 3) heavy chain CDRs from the corresponding CDRs of the heavy chain of X124-G01 or X115-F02.

[0104] In a preferred embodiment, the protein is an antibody (e.g., a human antibody) having one or more (e.g., 1, 2, or 3) light chain CDRs from the corresponding CDRs of the light chain of X124-G01 or X115-F02.

[0105] In a preferred embodiment, the protein is an antibody (e.g., a human antibody) having one or more (e.g., 1, 2, or 3) heavy chain CDRs from the heavy chain of X124-G01 or X115-F02 and one or more (e.g., 1, 2, or 3) light chain CDRs from the corresponding CDRs of the light chain of X124-G01 or X115-F02.

[0106] In one embodiment, the HC and LC variable domain sequences are components of the same polypeptide chain.

[0107] In some embodiments, the plasma kallikrein binding protein has a serum residence time of 1 week, 2 weeks, 3 weeks, 4 weeks, 5 weeks or more, in vivo, e.g., in humans. In one embodiment, the plasma kallikrein binding protein is an IgG, e.g., an IgG1, IgG2, IgG3 or IgG4, that has a serum residence time of 1 week, 2 weeks, 3 weeks, 4 weeks, 5 weeks or more in vivo, e.g., in humans.

[0108] In some embodiments, the plasma kallikrein binding protein is physically associated with a moiety that improves serum residence time, e.g., a moiety described herein. In one embodiment, the plasma kallikrein binding protein is modified to include, e.g., PEGylation, fusion to serum albumin (e.g., human serum albumin), conjugation to human serum albumin, HESylation (HESylation utiliseshydroxyethyl starch (“HES”) derivatives linked to drug substances in order to modify the drug characteristics or fusion to a unstructured recombinant polymer (URPs).

[0109] In another embodiment, the HC and LC variable domain sequences are components of different polypeptide chains. For example, the protein is an IgG, e.g., IgG1, IgG2, IgG3, or IgG4. The protein can be a soluble Fab (sFab).

[0110] In other embodiments, the protein includes a Fab2′, scFv, minibody, scFv::Fc fusion, Fab::HSA fusion, HSA::Fab fusion, Fab::HSA::Fab fusion, or other molecule that comprises the antigen combining site of one of the binding proteins herein. The VH and VL regions of these Fabs can be provided as IgG, Fab, Fab2, Fab2′, scFv, PEGylated Fab, PEGylated scFv, PEGylated Fab2, VH::CH1::HSA+LC, HSA::VH::CH1+LC, LC::HSA+VH::CH1, HSA::LC+VH::CH1, or other appropriate construction.

[0111] In one embodiment, the protein is a human or humanized antibody or is non-immunogenic in a human. For example, the protein includes one or more human antibody framework regions, e.g., all human framework regions.

[0112] In one embodiment, the protein includes a human Fc domain, or an Fc domain that is at least 95, 96, 97, 98, or 99% identical to a human Fc domain.

[0113] In one embodiment, the protein is a primate or primatized antibody or is non-immunogenic in a human. For example, the protein includes one or more primate antibody framework regions, e.g., all primate framework regions.

[0114] In one embodiment, the protein includes a primate Fc domain, or an Fc domain that is at least 95, 96, 97, 98, or 99% identical to a primate Fc domain. “Primate” includes humans (Homo sapiens), chimpanzees (Pan troglodytes and Pan paniscus (bonobos)), gorillas (Gorilla gorilla), gibons, monkeys, lemurs, aye-ayes (Daubentonia madagascariensis), and tarsiers.

[0115] In one embodiment, the protein includes human framework regions, or framework regions that are at least 95, 96, 97, 98, or 99% identical to human framework regions.

[0116] In certain embodiments, the protein includes no sequences from mice or rabbits (e.g., is not a murine or rabbit antibody).

[0117] In certain embodiments, the protein is capable of binding to a cell or tissue, e.g., that expresses plasma kallikrein.

[0118] In one embodiment, protein is physically associated with a nanoparticle, and can be used to guide a nanoparticle to a cell or tissue expressing plasma kallikrein.

[0119] In some aspects, the disclosure features a pharmaceutical composition comprising a kallikrein binding protein described herein, e.g., including a pharmaceutically acceptable carrier. In some embodiments, the composition can be at least 10, 20, 30, 50, 75, 85, 90, 95, 98, 99, or 99.9% free of other protein species. In one embodiment, the pharmaceutical composition can be at least 10, 20, 30, 50, 75, 85, 90, 95, 98, 99, or 99.9% free of fragments of the binding protein that do not binding plasma kallikrein (e.g., human plasma kallikrein) or bind plasma kallikrein (e.g., human plasma kallikrein with a Ki, app of 5000 nM or greater.

[0120] In some aspects, the disclosure features a method of treating or preventing a plasma kallikrein associated disorder in a subject, the method comprising:
[0121] administering an isolated protein (e.g., antibody, e.g., human antibody) that binds plasma kallikrein (e.g., human plasma kallikrein and/or mouse plasma kallikrein) and, e.g., does not bind prekallikrein (e.g., human prekallikrein and/or mouse prekallikrein) to the subject,

[0122] In some embodiments, the protein binds the same epitope or competes for binding with a protein (e.g., epi-Kal2) and/or a small molecule (e.g., AEBSF) described herein.

[0123] In some embodiments, the protein binds the same epitope or competes for binding with a kallikrein binding protein described herein.

[0124] In some embodiments, the plasma kallikrein associated disorder is selected from the group consisting of rheumatoid arthritis, gout, intestinal bowel disease, oral mucositis, neuropathic pain, inflammatory pain, spinal stenosis-degenerative spine disease, arterial or venous thrombosis, post operative ileus, aortic aneurysm, osteoarthritis, vasculitis, edema, hereditary angioedema, cerebral edema, pulmonary embolism, stroke, clotting on ventricular assistance devices or stents, head trauma or peri-tumor brain edema, sepsis, acute middle cerebral artery (MCA) ischemic event (stroke), restenosis (e.g., after angioplasty), systemic lupus erythematosis nephritis, and burn injury. In some embodiments, the plasma kallikrein binding protein reduces abberent clotting associated with the contact activation system (i.e., intrinsic activation system) by at least 10% as measured by e.g., an APTT clotting assay. In other embodiments, the plasma kallikrein binding protein reduces abberent clotting associated with the contact activation system by at least 20%, at least 30%, at least 40%, at least 50%, at least 60%, at least 70%, at least 80%, at least 90%, at least 95%, at least 99%, or even 100% (i.e., no detectable abberent clotting).

[0125] In some embodiments, the plasma kallikrein binding protein is administered in combination with another treatment for the disorder.

[0126] In some embodiments, the protein described herein is selected from the group consisting of M162-A04, M199-A08, M160-G12, M142-H08, X63-G06, X101-A01, X81-B01, X67-D03, X67-G04, X115-B07, X115-D05, X115-E09, X115-H06, X115-A03, X115-D01, X115-F02, X124-G01, X115-G04, M29-D09, M145-D11, M06-D09 and M35-G04.

[0127] In some embodiments, the plasma kallikrein binding protein competes with or binds the same epitope as X81-B01.

[0128] In some embodiments, the plasma kallikrein binding protein competes with or binds the same epitope as X67-D03.

[0129] In some embodiments, the plasma kallikrein binding protein competes with or binds to the same epitope as M162-A04 or X115-F02.

[0130] In some embodiments, the plasma kallikrein binding protein does not bind prekallikrein (e.g., human prekallikrein and/or mouse prekallikrein), but binds to the active form of plasma kallikrein (e.g., human plasma kallikrein and/or mouse plasma kallikrein).

[0131] In certain embodiments, the protein binds at or near the active site of the catalytic domain of plasma kallikrein, or a fragment thereof, or binds an epitope that overlaps with the active site of plasma kallikrein.

[0132] In some embodiments, the protein binds to one or more amino acids that form the catalytic triad of plasma kallikrein: His434, Asp483, and/or Ser578 (numbering based on the human sequence).

[0133] In some embodiments, the protein binds to one or more amino acids of Ser479, Tyr563, and/or Asp585 (numbering based on the human sequence).

[0134] In other embodiments, the protein binds to one or more amino acids of Arg551, Gln553, Tyr555, Thr558, and/or Arg560 (numbering based on the human sequence). In some embodiments, the plasma kallikrein binding protein binds one or more amino acids of: S478, N481, S525, and K526 (numbering based on the human kallikrein sequence).

[0135] In some embodiments, the plasma kallikrein binding protein decreases Factor XIIa and/or bradykinin production by greater than about 5%, about 10%, about 15%, about 20%, about 25%, about 30%, about 35%, about 40%, about 45%, about 50%, about 55%, about 60%, about 65%, about 70%, about 75%, about 80%, about 85%, about 90%, or about 95% as compared to a standard, e.g., the Factor XIIa and/or bradykinin production under the same conditions but in the absence of the protein.

[0136] In some embodiments, the plasma kallikrein binding protein has an apparent inhibition constant (K_{i,app}) of less than 1000, 500, 100, 10, 5, 1, 0.5, or 0.2 nM.

[0137] In one embodiment, the HC and LC variable domain sequences are components of the same polypeptide chain.

[0138] In some embodiments, the plasma kallikrein binding protein has a serum residence time of 1 week, 2 weeks, 3 weeks, 4 weeks, 5 weeks or more, in vivo, e.g., in humans. In one embodiment, the plasma kallikrein binding protein is an IgG, e.g., an IgG1, IgG2, IgG3 or IgG4, that has a serum residence time of 1 week, 2 weeks, 3 weeks, 4 weeks, 5 weeks or more in vivo, e.g., in humans.

[0139] In some embodiments, the plasma kallikrein binding protein is physically associated with a moiety that improves serum residence time, e.g., a moiety described herein.

[0140] In another embodiment, the HC and LC variable domain sequences are components of different polypeptide chains. For example, the plasma kallikrein binding protein is an IgG, e.g., IgG1, IgG2, IgG3, or IgG4. The plasma kallikrein binding protein can be a soluble Fab (sFab).

[0141] In other implementations the plasma kallikrein binding protein includes a Fab2′, scFv, minibody, scFv::Fc fusion, Fab::HSA fusion, HSA::Fab fusion, Fab::HSA::Fab fusion, or other molecule that comprises the antigen combining site of one of the binding proteins herein. The VH and VL regions of these Fabs can be provided as IgG, Fab, Fab2, Fab2′, scFv, PEGylated Fab, PEGylated scFv, PEGylated Fab2, VH::CH1::HSA+LC, HSA::VH::CH1+LC, LC::HSA+VH::CH1, HSA::LC+VH::CH1, or other appropriate construction.

[0142] In one embodiment, the plasma kallikrein binding protein is a human or humanized antibody or is non-immunogenic in a human. For example, the protein includes one or more human antibody framework regions, e.g., all human framework regions.

[0143] In one embodiment, the plasma kallikrein binding protein includes a human Fc domain, or an Fc domain that is at least 95, 96, 97, 98, or 99% identical to a human Fc domain.

[0144] In one embodiment, the plasma kallikrein binding protein is a primate or primatized antibody or is non-immunogenic in a human. For example, the protein includes one or more primate antibody framework regions, e.g., all primate framework regions.

[0145] In one embodiment, the plasma kallikrein binding protein includes a primate Fc domain, or an Fc domain that is at least 95, 96, 97, 98, or 99% identical to a primate Fc domain. “Primate” includes humans (Homo sapiens), chimpanzees (Pan troglodytes and Pan paniscus (bonobos)), gorillas (Gorilla gorilla), gibons, monkeys, lemurs, aye-ayes (Daubentonia madagascariensis), and tarsiers.

[0146] In one embodiment, the plasma kallikrein binding protein includes human framework regions, or framework regions that are at least 95, 96, 97, 98, or 99% identical to human framework regions.

[0147] In certain embodiments, the plasma kallikrein binding protein includes no sequences from mice or rabbits (e.g., is not a murine or rabbit antibody).

[0148] In certain embodiments, the plasma kallikrein binding protein is capable of binding to a cell or tissue, e.g., that expresses plasma kallikrein.

[0149] In one embodiment, the plasma kallikrein binding protein is physically associated with a nanoparticle, and can be used to guide a nanoparticle to a cell or tissue expressing plasma kallikrein.

[0150] A method of treating or preventing a plasma kallikrein associated disorder in a subject, the method comprising:
[0151] administering an isolated protein (e.g., antibody, e.g., human antibody) comprising a heavy chain immunoglobulin variable domain sequence and a light chain immunoglobulin variable domain sequence to the subject, wherein:
[0152] the heavy chain immunoglobulin variable domain sequence comprises one, two, or three (e.g., three) CDR regions from the heavy chain variable domain of a protein described herein, and/or
[0153] the light chain immunoglobulin variable domain sequence comprises one, two, or three (e.g., three) CDR regions from the light chain variable domain of a protein described herein,
[0154] wherein the protein binds to plasma kallikrein (e.g., human plasma kallikrein and/or mouse plasma kallikrein).

[0155] In some embodiments, the plasma kallikrein associated disorder is selected from the group consisting of rheumatoid arthritis, gout, intestinal bowel disease, oral mucositis, neuropathic pain, inflammatory pain, spinal stenosis-degenerative spine disease, arterial or venous thrombosis, post operative ileus, aortic aneurysm, osteoarthritis, vasculitis, edema, hereditary angioedema, cerebral edema, pulmonary embolism, stroke, clotting of ventrical assistance devices or stents, head trauma or peri-tumor brain edema, sepsis, acute middle cerebral artery (MCA) ischemic event (stroke), restenosis (e.g., after angioplasty), systemic lupus erythematosis nephritis, and burn injury. In some embodiments, the plasma kallikrein binding protein reduces abberent clotting associated with the contact activation system (i.e., intrinsic activation system) by at least 10% as measured by e.g., an APTT clotting assay (e.g., by at least 20%, at least 30%, at least 40%, at least 50%, at least 60%, at least 70%, at least 80%, at least 90%, at least 95%, at least 99%, or even 100% (i.e., no detectable abberent clotting)).

[0156] In some embodiments, the protein is administered in combination with another treatment for the disorder.

[0157] In some embodiments, the protein is administered in combination with a second agent selected from the group consisting of ecallantide, a C1 esterase inhibitor, aprotinin, a bradykinin B2 receptor inhibitor (e.g., icatibant).

[0158] In some embodiments, the heavy chain immunoglobulin variable domain sequence comprises one, two, or three (e.g., three) CDR regions from the heavy chain variable domain of M162-A04, M199-A08, M160-G12, M142-H08, X63-G06, X101-A01, X81-B01, X67-D03, X67-G04, X115-B07, X115-D05, X115-E09, X115-H06, X115-A03, X115-D01, X115-F02, X124-G01, X115-G04, M29-D09, M145-D11, M06-D09 and M35-G04, and/or
[0159] the light chain immunoglobulin variable domain sequence comprises one, two, or three (e.g., three) CDR regions from the light chain variable domain of M162-A04, M199-A08, M160-G12, M142-H08, X63-G06, X101-A01, X81-B01, X67-D03, X67-G04, X115-B07, X115-D05, X115-E09, X115-H06, X115-A03, X115-D01, X115-F02, X124-G01, X115-G04, M29-D09, M145-D11, M06-D09 and M35-G04 (respectively).

[0160] In some embodiments, the protein inhibits plasma kallikrein.

[0161] In some embodiments, the one, two, or three (e.g., three) CDR regions from the heavy chain variable domain are from X81-B01 and/or the one, two, or three (e.g., three) CDR regions from the light chain variable domain are from X81-B01.

[0162] In some embodiments, the one, two, or three (e.g., three) CDR regions from the heavy chain variable domain are from X67-D03 and/or the one, two, or three (e.g., three) CDR regions from the light chain variable domain are from X67-D03.

[0163] In some embodiments, the one, two, or three (e.g., three) CDR regions from the heavy chain variable domain are from M162-A04 and/or the one, two, or three (e.g., three) CDR regions from the light chain variable domain are from M162-A04.

[0164] In some embodiments, the one, two, or three (e.g., three) CDR regions from the heavy chain variable domain are from X115-F02 and/or the one, two, or three (e.g., three) CDR regions from the light chain variable domain are from X115-F02.

[0165] In some embodiments, the heavy chain immunoglobulin variable domain sequence comprises the heavy chain variable domain of a protein described herein, and/or the light chain immunoglobulin variable domain sequence comprises the light chain variable domain of a protein described herein.

[0166] In some embodiments, the heavy chain immunoglobulin variable domain sequence comprises the heavy chain variable domain of M162-A04, M199-A08, M160-G12, M142-H08 X63-G06, X101-A01, X81-B01, X67-D03, X67-G04, X115-B07, X115-D05, X115-E09, X115-H06, X115-A03, X115-D01, X115-F02, X124-G01, X115-G04, M29-D09, M145-D11, M06-D09 and M35-G04, and/or the light chain immunoglobulin variable domain sequence comprises the light chain variable domain of M162-A04, M199-A08, M160-G12, M142-H08, X63-G06, X101-A01, X81-B01, X67-D03, X67-G04, X115-B07, X115-D05, X115-E09, X115-H06, X115-A03, X115-D01, X115-F02, X124-G01, X115-G04, M29-D09, M145-D11, M06-D09 and M35-G04.

[0167] In some embodiments, the heavy chain immunoglobulin variable domain sequence comprises the heavy chain variable domain of X81-B01, and/or the light chain immunoglobulin variable domain sequence comprises the light chain variable domain of X81-B01.

[0168] In some embodiments, the heavy chain immunoglobulin variable domain sequence comprises the heavy chain variable domain of X67-D03, and/or the light chain immunoglobulin variable domain sequence comprises the light chain variable domain of X67-D03.

[0169] In some embodiments, the protein comprises the heavy chain of a protein described herein, and/or the light chain of a protein described herein.

[0170] In some embodiments, the protein comprises the heavy chain of M162-A04, M199-A08, M160-G12, M142-H08, X63-G06, X101-A01, X81-B01, X67-D03, X67-G04, X115-B07, X115-D05, X115-E09, X115-H06, X115-A03, X115-D01, X115-F02, X124-G01, X115-G04, M29-D09, M145-D11, M06-D09 and M35-G04, and/or the light chain of M162-A04, M199-A08, M160-G12, M142-H08, X63-G06, X101-A01, X81-B01, X67-D03, X67-G04, X115-B07, X115-D05, X115-E09, X115-H06, X115-A03, X115-D01, X115-F02, X124-G01, X115-G04, M29-D09, M145-D11, M06-D09 and M35-G04 (respectively).

[0171] In some embodiments, the protein comprises the heavy chain of X81-B01, and/or the light chain of X81-B01.

[0172] In some embodiments, the protein comprises the heavy chain of X67-D03, and/or the light chain of X67-D03.

[0173] In some embodiments, the protein comprises the heavy chain of M162-A04, and/or the light chain of M162-A04.

[0174] In some embodiments, the protein comprises the heavy chain of X115-F02 or X124-G01, and/or the light chain of X115-F02 or X124-G01.

[0175] In some embodiments, the plasma kallikrein binding protein does not bind prekallikrein (e.g., human prekallikrein and/or murine prekallikrein), but binds to the active form of plasma kallikrein (e.g., human plasma kallikrein and/or murine plasma kallikrein).

[0176] In some embodiments, the plasma kallikrein binding protein decreases Factor XIIa and/or bradykinin production by greater than about 5%, about 10%, about 15%, about 20%, about 25%, about 30%, about 35%, about 40%, about 45%, about 50%, about 55%, about 60%, about 65%, about 70%, about 75%, about 80%, about 85%, about 90%, or about 95% as compared to a standard, e.g., the Factor XIIa and/or bradykinin production under the same conditions but in the absence of the protein.

[0177] In some embodiments, the protein includes one or more of the following characteristics: (a) a human CDR or human framework region; (b) the HC immunoglobulin variable domain sequence comprises one or more (e.g., 1, 2, or 3) CDRs that are at least 85, 88, 89, 90, 91, 92, 93, 94, 95, 96, 97, 98, 99, or 100% identical to a CDR of a HC variable domain described herein; (c) the LC immunoglobulin variable domain sequence comprises one or more (e.g., 1, 2, or 3) CDRs that are at least 85, 88, 89, 90, 91, 92, 93, 94, 95, 96, 97, 98, 99, or 100% identical to a CDR of a LC variable domain described herein; (d) the LC immunoglobulin variable domain sequence is at least 85, 88, 89, 90, 91, 92, 93, 94, 95, 96, 97, 98, 99, or 100% identical to a LC variable domain described herein (e.g., overall or in framework regions or CDRs); (e) the HC immunoglobulin variable domain sequence is at least 85, 88, 89, 90, 91, 92, 93, 94, 95, 96, 97, 98, 99, or 100% identical to a HC variable domain described herein (e.g., overall or in framework regions or CDRs); (f) the protein binds an epitope bound by a protein described herein, or competes for binding with a protein described herein; and (g) a primate CDR or primate framework region.

[0178] In some embodiments, the protein has an apparent inhibition constant (K_{i,app}) of less than 1000, 500, 100, 10, 5, 1, 0.5 or 0.2 nM.

[0179] In some embodiments, the antibody does not bind prekallikrein (e.g., human prekallikrein), but binds to the active form of plasma kallikrein (e.g., human plasma kallikrein).

[0180] In a preferred embodiment, the protein is an antibody (e.g., a human antibody) having the light and heavy chains of antibodies selected from the group consisting of M162-A04, M199-A08, M160-G12, M142-H08, X63-G06, X101-A01, X81-B01, X67-D03, X67-G04, X115-B07, X115-D05, X115-E09, X115-H06, X115-A03, X115-D01, X115-F02, X124-G01, X115-G04, M29-D09, M145-D11, M06-D09 and M35-G04.

[0181] In a preferred embodiment, the protein is an antibody (e.g., a human antibody) having the heavy chain of an antibody selected from the group consisting of: M162-A04, M199-A08, M160-G12, M142-H08, X63-G06, X101-A01, X81-B01, X67-D03, X67-G04, X115-B07, X115-D05, X115-E09, X115-H06, X115-A03, X115-D01, X115-F02, X124-G01, X115-G04, M29-D09, M145-D11, M06-D09 and M35-G04.

[0182] In a preferred embodiment, the protein is an antibody (e.g., a human antibody) having the light chain of an antibody selected from the group consisting of: M162-A04, M199-A08, M160-G12, M142-H08, X63-G06, X101-A01, X81-B01, X67-D03, X67-G04, X115-B07, X115-D05, X115-E09, X115-H06, X115-A03, X115-D01, X115-F02, X124-G01, X115-G04, M29-D09, M145-D11, M06-D09 and M35-G04.

[0183] In a preferred embodiment, the protein is an antibody (e.g., a human antibody) having light and heavy antibody variable regions of an antibody selected from the group consisting of M162-A04, M199-A08, M160-G12, M142-H08, X63-G06, X101-A01, X81-B01, X67-D03, X67-G04, X115-B07, X115-D05, X115-E09, X115-H06, X115-A03, X115-D01, X115-F02, X124-G01, X115-G04, M29-D09, M145-D11, M06-D09 and M35-G04.

[0184] In a preferred embodiment, the protein is an antibody (e.g., a human antibody) having a heavy chain antibody variable region of an antibody selected from the group consisting of: M162-A04, M199-A08, M160-G12, M142-H08, X63-G06, X101-A01, X81-B01, X67-D03, X67-G04, X115-B07, X115-D05, X115-E09, X115-H06, X115-A03, X115-D01, X115-F02, X124-G01, X115-G04, M29-D09, M145-D11, M06-D09 and M35-G04.

[0185] In a preferred embodiment, the protein is an antibody (e.g., a human antibody) having a light chain antibody variable region of an antibody selected from the group consisting of: M162-A04, M199-A08, M160-G12, M142-H08, X63-G06, X101-A01, X81-B01, X67-D03, X67-G04, X115-B07, X115-D05, X115-E09, X115-H06, X115-A03, X115-D01, X115-F02, X124-G01, X115-G04, M29-D09, M145-D11, M06-D09 and M35-G04.

[0186] In a preferred embodiment, the protein is an antibody (e.g., a human antibody) having one or more (e.g., 1, 2, or 3) heavy chain CDRs selected from the corresponding CDRs of the group of heavy chains consisting of M162-A04, M199-A08, M160-G12, M142-H08, X63-G06, X101-A01, X81-B01, X67-D03, X67-G04, X115-B07, X115-D05, X115-E09, X115-H06, X115-A03, X115-D01, X115-F02, X124-G01, X115-G04, M29-D09, M145-D11, M06-D09 and M35-G04.

[0187] In a preferred embodiment, the protein is an antibody (e.g., a human antibody) having one or more (e.g., 1, 2, or 3) light chain CDRs selected from the corresponding CDRs of the group of light chains consisting of M162-A04, M199-A08, M160-G12, M142-H08, X63-G06, X101-A01, X81-B01, X67-D03, X67-G04, X115-B07, X115-D05, X115-E09, X115-H06, X115-A03, X115-D01, X115-F02, X124-G01, X115-G04, M29-D09, M145-D11, M06-D09 and M35-G04.

[0188] In a preferred embodiment, the protein is an antibody (e.g., a human antibody) having one or more (e.g., 1, 2, or 3) heavy chain CDRs selected from the corresponding CDRs of the group of heavy chains consisting of M162-A04, M199-A08, M160-G12, M142-H08, X63-G06, X101-A01, X81-B01, X67-D03, X67-G04, X115-B07, X115-D05, X115-E09, X115-H06, X115-A03, X115-D01, X115-F02, X124-G01, X115-G04, M29-D09, M145-D11, M06-D09 and M35-G04 and one or more (e.g., 1, 2, or 3) light chain CDRs selected from the corresponding CDRs of the group of light chains consisting of M162-A04, M199-A08, M160-G12, M142-H08, X63-G06, X101-A01, X81-B01, X67-D03, X67-G04, X115-B07, X115-D05, X115-E09, X115-H06, X115-A03, X115-D01, X115-F02, X124-G01, X115-G04, M29-D09, M145-D11, M06-D09 and M35-G04 (respectively).

[0189] In a preferred embodiment, the protein is an antibody (e.g., a human antibody) having the light and heavy chains of X81-B01.

[0190] In a preferred embodiment, the protein is an antibody (e.g., a human antibody) having the heavy chain of X81-B01.

[0191] In a preferred embodiment, the protein is an antibody (e.g., a human antibody) having the light chain of X81-B01.

[0192] In a preferred embodiment, the protein is an antibody (e.g., a human antibody) having light and heavy antibody variable regions of an antibody selected from X81-B01.

[0193] In a preferred embodiment, the protein is an antibody (e.g., a human antibody) having a heavy chain antibody variable region of X81-B01.

[0194] In a preferred embodiment, the protein is an antibody (e.g., a human antibody) having a light chain antibody variable region of X81-B01.

[0195] In a preferred embodiment, the protein is an antibody (e.g., a human antibody) having one or more (e.g., 1, 2, or 3) heavy chain CDRs from the corresponding CDRs of the heavy chain of X81-B01.

[0196] In a preferred embodiment, the protein is an antibody (e.g., a human antibody) having one or more (e.g., 1, 2, or 3) light chain CDRs from the corresponding CDRs of the light chain of X81-B01.

[0197] In a preferred embodiment, the protein is an antibody (e.g., a human antibody) having one or more (e.g., 1, 2, or 3) heavy chain CDRs from the heavy chain of X81-B01 and one or more (e.g., 1, 2, or 3) light chain CDRs from the corresponding CDRs of the light chain of X81-B01.

[0198] In a preferred embodiment, the protein is an antibody (e.g., a human antibody) having the light and heavy chains of X67-D03.

[0199] In a preferred embodiment, the protein is an antibody (e.g., a human antibody) having the heavy chain of X67-D03.

[0200] In a preferred embodiment, the protein is an antibody (e.g., a human antibody) having the light chain of X67-D03.

[0201] In a preferred embodiment, the protein is an antibody (e.g., a human antibody) having light and heavy antibody variable regions of an antibody selected from X67-D03.

[0202] In a preferred embodiment, the protein is an antibody (e.g., a human antibody) having a heavy chain antibody variable region of X67-D03.

[0203] In a preferred embodiment, the protein is an antibody (e.g., a human antibody) having a light chain antibody variable region of X67-D03.

[0204] In a preferred embodiment, the protein is an antibody (e.g., a human antibody) having one or more (e.g., 1, 2, or 3) heavy chain CDRs from the corresponding CDRs of the heavy chain of X67-D03.

[0205] In a preferred embodiment, the protein is an antibody (e.g., a human antibody) having one or more (e.g., 1, 2, or 3) light chain CDRs from the corresponding CDRs of the light chain of X67-D03.

[0206] In a preferred embodiment, the protein is an antibody (e.g., a human antibody) having one or more (e.g., 1, 2, or 3) heavy chain CDRs from the heavy chain of X67-D03 and one or more (e.g., 1, 2, or 3) light chain CDRs from the corresponding CDRs of the light chain of X67-D03.

[0207] In a preferred embodiment, the protein is an antibody (e.g., a human antibody) having the light and heavy chains of X115-F02 or X124-G01.

[0208] In a preferred embodiment, the protein is an antibody (e.g., a human antibody) having the heavy chain of X115-F02 or X124-G01.

[0209] In a preferred embodiment, the protein is an antibody (e.g., a human antibody) having the light chain of X115-F02 or X124-G01.

[0210] In a preferred embodiment, the protein is an antibody (e.g., a human antibody) having light and heavy antibody variable regions of an antibody selected from X115-F02 or X124-G01.

[0211] In a preferred embodiment, the protein is an antibody (e.g., a human antibody) having a heavy chain antibody variable region of X115-F02 or X124-G01.

[0212] In a preferred embodiment, the protein is an antibody (e.g., a human antibody) having a light chain antibody variable region of X115-F02 or X124-G01.

[0213] In a preferred embodiment, the protein is an antibody (e.g., a human antibody) having one or more (e.g., 1, 2, or 3) heavy chain CDRs from the corresponding CDRs of the heavy chain of X115-F02 or X124-G01.

[0214] In a preferred embodiment, the protein is an antibody (e.g., a human antibody) having one or more (e.g., 1, 2, or 3) light chain CDRs from the corresponding CDRs of the light chain of X115-F02 or X124-G01.

[0215] In a preferred embodiment, the protein is an antibody (e.g., a human antibody) having one or more (e.g., 1, 2, or 3) heavy chain CDRs from the heavy chain of X115-F02 or X124-G01 and one or more (e.g., 1, 2, or 3) light chain CDRs from the corresponding CDRs of the light chain of X115-F02 or X124-G01.

[0216] In one embodiment, the HC and LC variable domain sequences are components of the same polypeptide chain.

[0217] In some embodiments, the plasma kallikrein binding protein has a serum residence time of 1 week, 2 weeks, 3 weeks, 4 weeks, 5 weeks or more, in vivo, e.g., in humans. In one embodiment, the plasma kallikrein binding protein is an IgG, e.g., an IgG1, IgG2, IgG3 or IgG4, that has a serum residence time of 1 week, 2 weeks, 3 weeks, 4 weeks, 5 weeks or more in vivo, e.g., in humans.

[0218] In some embodiments, the plasma kallikrein binding protein is physically associated with a moiety that improves serum residence time, e.g., a moiety described herein.

[0219] In another embodiment, the HC and LC variable domain sequences are components of different polypeptide chains. For example, the protein is an IgG, e.g., IgG1, IgG2, IgG3, or IgG4. The protein can be a soluble Fab (sFab).

[0220] In other implementations the protein includes a Fab2′, scFv, minibody, scFv::Fc fusion, Fab::HSA fusion, HSA::Fab fusion, Fab::HSA::Fab fusion, or other molecule that comprises the antigen combining site of one of the binding proteins herein. The VH and VL regions of these Fabs can be provided as IgG, Fab, Fab2, Fab2′, scFv, PEGylated Fab, PEGylated scFv, PEGylated Fab2, VH::CH1::HSA+LC, HSA::VH::CH1+LC, LC::HSA+VH::CH1, HSA::LC+VH::CH1, or other appropriate construction.

[0221] In one embodiment, the protein is a human or humanized antibody or is non-immunogenic in a human. For example, the protein includes one or more human antibody framework regions, e.g., all human framework regions.

[0222] In one embodiment, the protein includes a human Fc domain, or an Fc domain that is at least 95, 96, 97, 98, or 99% identical to a human Fc domain.

[0223] In one embodiment, the protein is a primate or primatized antibody or is non-immunogenic in a human. For example, the protein includes one or more primate antibody framework regions, e.g., all primate framework regions.

[0224] In one embodiment, the protein includes a primate Fc domain, or an Fc domain that is at least 95, 96, 97, 98, or 99% identical to a primate Fc domain. “Primate” includes humans (Homo sapiens), chimpanzees (Pan troglodytes and Pan paniscus (bonobos)), gorillas (Gorilla gorilla), gibons, monkeys, lemurs, aye-ayes (Daubentonia madagascariensis), and tarsiers.

[0225] In one embodiment, the protein includes human framework regions, or framework regions that are at least 95, 96, 97, 98, or 99% identical to human framework regions.

[0226] In certain embodiments, the protein includes no sequences from mice or rabbits (e.g., is not a murine or rabbit antibody).

[0227] In certain embodiments, the protein is capable of binding to a cell or tissue, e.g., that expresses plasma kallikrein.

[0228] In one embodiment, protein is physically associated with a nanoparticle, and can be used to guide a nanoparticle to a cell or tissue expressing plasma kallikrein.

[0229] In some aspects, the disclosure features a method of promoting wound healing in a subject, the method comprising:
[0230] administering an isolated protein (e.g., antibody, e.g., human antibody) that binds plasma kallikrein (e.g., human plasma kallikrein and/or mouse plasma kallikrein) and, e.g., does not bind prekallikrein (e.g., human prekallikrein and/or mouse prekallikrein) to the subject.

[0231] In some embodiments, the protein binds the same epitope or competes for binding with a kallikrein binding protein described herein. In some embodiments, the protein binds the same epitope or competes for binding with a protein (e.g., epi-Kal2) and/or a small molecule (e.g., AEBSF) described herein.

[0232] In some embodiments, the plasma kallikrein binding protein is administered in combination with another treatment for wound healing.

[0233] In some embodiments, the protein described herein is selected from the group consisting of M162-A04, M199-A08, M160-G12, M142-H08, X63-G06, X101-A01, X81-B01, X67-D03, X67-G04, X115-B07, X115-D05, X115-E09, X115-H06, X115-A03, X115-D01, X115-F02, X124-G01, X115-G04, M29-D09, M145-D11, M06-D09 and M35-G04.

[0234] In some embodiments, the plasma kallikrein binding protein competes with or binds the same epitope as X81-B01.

[0235] In some embodiments, the plasma kallikrein binding protein competes with or binds the same epitope as X67-D03.

[0236] In some embodiments, the plasma kallikrein binding protein competes with or binds the same epitope as M162-A04.

[0237] In some embodiments, the plasma kallikrein binding protein competes with or binds the same epitope as X115-F02 or X124-G01.

[0238] In some embodiments, the plasma kallikrein binding protein does not bind prekallikrein (e.g., human prekallikrein), but binds to the active form of plasma kallikrein (e.g., human plasma kallikrein).

[0239] In certain embodiments, the protein binds at or near the active site of the catalytic domain of plasma kallikrein, or a fragment thereof, or binds an epitope that overlaps with the active site of plasma kallikrein.

[0240] In some embodiments, the protein binds to one or more amino acids that form the catalytic triad of plasma kallikrein: His434, Asp483, and/or Ser578 (numbering based on the human sequence). In other embodiments, the protein binds to one or more amino acids that form a region for substrate recognition: Arg551, Gln553, Tyr555, Thr558, and/or Arg560 (numbering based on the human sequence). In some embodiments, the plasma kallikrein binding protein binds one or more amino acids of: S478, N481, S525, and K526 (numbering based on the human kallikrein sequence).

[0241] In some embodiments, the protein binds to one or more amino acids of Ser479, Tyr563, and/or Asp585 (numbering based on the human sequence).

[0242] In some embodiments, the plasma kallikrein binding protein decreases Factor XIIa and/or bradykinin production by greater than about 5%, about 10%, about 15%, about 20%, about 25%, about 30%, about 35%, about 40%, about 45%, about 50%, about 55%, about 60%, about 65%, about 70%, about 75%, about 80%, about 85%, about 90%, or about 95% as compared to a standard, e.g., the Factor XIIa and/or bradykinin production under the same conditions but in the absence of the protein.

[0243] In some embodiments, the plasma kallikrein binding protein has an apparent inhibition constant (K_{i,app}) of less than 1000, 500, 100, 10, 5, 1, 0.5 or 0.2 nM.

[0244] In one embodiment, the HC and LC variable domain sequences are components of the same polypeptide chain.

[0245] In some embodiments, the plasma kallikrein binding protein has a serum residence time of 1 week, 2 weeks, 3 weeks, 4 weeks, 5 weeks or more, in vivo, e.g., in humans. In one embodiment, the plasma kallikrein binding protein is an IgG, e.g., an IgG1, IgG2, IgG3 or IgG4, that has a serum residence time of 1 week, 2 weeks, 3 weeks, 4 weeks, 5 weeks or more in vivo, e.g., in humans.

[0246] In some embodiments, the plasma kallikrein binding protein is physically associated with a moiety that improves serum residence time, e.g., a moiety described herein.

[0247] In another embodiment, the HC and LC variable domain sequences are components of different polypeptide chains. For example, the plasma kallikrein binding protein is an IgG, e.g., IgG1, IgG2, IgG3, or IgG4. The plasma kallikrein binding protein can be a soluble Fab (sFab).

[0248] In other implementations the plasma kallikrein binding protein includes a Fab2′, scFv, minibody, scFv::Fc fusion, Fab::HSA fusion, HSA::Fab fusion, Fab::HSA::Fab fusion, or other molecule that comprises the antigen combining site of one of the binding proteins herein. The VH and VL regions of these Fabs can be provided as IgG, Fab, Fab2, Fab2′, scFv, PEGylated Fab, PEGylated scFv, PEGylated Fab2, VH::CH1::HSA+LC, HSA::VH::CH1+LC, LC::HSA+VH::CH1, HSA::LC+VH::CH1, or other appropriate construction.

[0249] In one embodiment, the plasma kallikrein binding protein is a human or humanized antibody or is non-immunogenic in a human. For example, the protein includes one or more human antibody framework regions, e.g., all human framework regions.

[0250] In one embodiment, the plasma kallikrein binding protein includes a human Fc domain, or an Fc domain that is at least 95, 96, 97, 98, or 99% identical to a human Fc domain.

[0251] In one embodiment, the plasma kallikrein binding protein is a primate or primatized antibody or is non-immunogenic in a human. For example, the protein includes one or more primate antibody framework regions, e.g., all primate framework regions.

[0252] In one embodiment, the plasma kallikrein binding protein includes a primate Fc domain, or an Fc domain that is at least 95, 96, 97, 98, or 99% identical to a primate Fc domain. “Primate” includes humans (Homo sapiens), chimpanzees (Pan troglodytes and Pan paniscus (bonobos)), gorillas (Gorilla gorilla), gibons, monkeys, lemurs, aye-ayes (Daubentonia madagascariensis), and tarsiers.

[0253] In one embodiment, the plasma kallikrein binding protein includes human framework regions, or framework regions that are at least 95, 96, 97, 98, or 99% identical to human framework regions.

[0254] In certain embodiments, the plasma kallikrein binding protein includes no sequences from mice or rabbits (e.g., is not a murine or rabbit antibody).

[0255] In certain embodiments, the protein is capable of binding to a cell or tissue, e.g., that expresses plasma kallikrein.

[0256] In one embodiment, the plasma kallikrein binding protein is physically associated with a nanoparticle, and can be used to guide a nanoparticle to a cell or tissue expressing plasma kallikrein.

[0257] In some aspects, the disclosure features a method promoting wound healing in a subject, the method comprising:
[0258] administering an isolated protein (e.g., antibody, e.g., human antibody) comprising a heavy chain immunoglobulin variable domain sequence and a light chain immunoglobulin variable domain sequence to the subject, wherein:
[0259] the heavy chain immunoglobulin variable domain sequence comprises one, two, or three (e.g., three) CDR regions from the heavy chain variable domain of a protein described herein, and/or
[0260] the light chain immunoglobulin variable domain sequence comprises one, two, or three (e.g., three) CDR regions from the light chain variable domain of a protein described herein,
[0261] wherein the protein binds to plasma kallikrein.

[0262] In some embodiments, the protein is administered in combination with another treatment for wound healing.

[0263] In some embodiments, the heavy chain immunoglobulin variable domain sequence comprises one, two, or three (e.g., three) CDR regions from the heavy chain variable domain of M162-A04, M199-A08, M160-G12, M142-H08, X63-G06, X101-A01, X81-B01, X67-D03, X67-G04, X115-B07, X115-D05, X115-E09, X115-H06, X115-A03, X115-D01, X115-F02, X124-G01, X115-G04, M29-D09, M145-D11, M06-D09 and M35-G04, and/or
[0264] the light chain immunoglobulin variable domain sequence comprises one, two, or three (e.g., three) CDR regions from the light chain variable domain of M162-A04, M199-A08, M160-G12, M142-H08, X63-G06, X101-A01, X81-B01, X67-D03, X67-G04, X115-B07, X115-D05, X115-E09, X115-H06, X115-A03, X115-D01, X115-F02, X124-G01, X115-G04, M29-D09, M145-D11, M06-D09 and M35-G04 (respectively).

[0265] In some embodiments, the protein inhibits plasma kallikrein.

[0266] In some embodiments, the one, two, or three (e.g., three) CDR regions from the heavy chain variable domain are from X81-B01 and/or the one, two, or three (e.g., three) CDR regions from the light chain variable domain are from X81-B01.

[0267] In some embodiments, the one, two, or three (e.g., three) CDR regions from the heavy chain variable domain are from X67-D03 and/or the one, two, or three (e.g., three) CDR regions from the light chain variable domain are from X67-D03.

[0268] In some embodiments, the one, two, or three (e.g., three) CDR regions from the heavy chain variable domain are from M162-A04 and/or the one, two, or three (e.g., three) CDR regions from the light chain variable domain are from M162-A04.

[0269] In some embodiments, the one, two, or three (e.g., three) CDR regions from the heavy chain variable domain are from M199-A08 and/or the one, two, or three (e.g., three) CDR regions from the light chain variable domain are from M199-A08.

[0270] In some embodiments, the one, two, or three (e.g., three) CDR regions from the heavy chain variable domain are from X115-F02 or X124-G01 and/or the one, two, or three (e.g., three) CDR regions from the light chain variable domain are from X115-F02 or X124-G01.

[0271] In some embodiments, the heavy chain immunoglobulin variable domain sequence comprises the heavy chain variable domain of a protein described herein, and/or the light chain immunoglobulin variable domain sequence comprises the light chain variable domain of a protein described herein.

[0272] In some embodiments, the heavy chain immunoglobulin variable domain sequence comprises the heavy chain variable domain of M162-A04, M199-A08, M160-G12, M142-H08, X63-G06, X101-A01, X81-B01, X67-D03, X67-G04, X115-B07, X115-D05, X115-E09, X115-H06, X115-A03, X115-D01, X115-F02, X124-G01, X115-G04, M29-D09, M145-D11, M06-D09 and M35-G04, and/or the light chain immunoglobulin variable domain sequence comprises the light chain variable domain of M162-A04, M199-A08, M160-G12, M142-H08, X63-G06, X101-A01, X81-B01, X67-D03, X67-G04, X115-B07, X115-D05, X115-E09, X115-H06, X115-A03, X115-D01, X115-F02, X124-G01, X115-G04, M29-D09, M145-D11, M06-D09 and M35-G04 (respectively).

[0273] In some embodiments, the heavy chain immunoglobulin variable domain sequence comprises the heavy chain variable domain of X81-B01, and/or the light chain immunoglobulin variable domain sequence comprises the light chain variable domain of X81-B01.

[0274] In some embodiments, the heavy chain immunoglobulin variable domain sequence comprises the heavy chain variable domain of X67-D03, and/or the light chain immunoglobulin variable domain sequence comprises the light chain variable domain of X67-D03.

[0275] In some embodiments, the protein comprises the heavy chain of a protein described herein, and/or the light chain of a protein described herein.

[0276] In some embodiments, the protein comprises the heavy chain of M162-A04, M199-A08, M160-G12, M142-H08, X63-G06, X101-A01, X81-B01, X67-D03, X67-G04, X115-B07, X115-D05, X115-E09, X115-H06, X115-A03, X115-D01, X115-F02, X124-G01, X115-G04, M29-D09, M145-D11, M06-D09 and M35-G04, and/or the light chain of M162-A04, M199-A08, M160-G12, M142-H08, X63-G06, X101-A01, X81-B01, X67-D03, X67-G04, X115-B07, X115-D05, X115-E09, X115-H06, X115-A03, X115-D01, X115-F02, X124-G01, X115-G04, M29-D09, M145-D11, M06-D09 and M35-G04 (respectively).

[0277] In some embodiments, the protein comprises the heavy chain of X81-B01, and/or the light chain of X81-B01.

[0278] In some embodiments, the protein comprises the heavy chain of X67-D03, and/or the light chain of X67-D03.

[0279] In some embodiments, the protein comprises the heavy chain of M162-A04, and/or the light chain of M162-A04.

[0280] In some embodiments, the protein comprises the heavy chain of X115-F02 or X124-G01, and/or the light chain of X115-F02 or X124-G01.

[0281] In some embodiments, the plasma kallikrein binding protein does not bind prekallikrein (e.g., human prekallikrein and/or murine prekallikrein), but binds to the active form of plasma kallikrein (e.g., human plasma kallikrein and/or murine plasma kallikrein).

[0282] In some embodiments, the plasma kallikrein binding protein decreases Factor XIIa and/or bradykinin production by greater than about 5%, about 10%, about 15%, about 20%, about 25%, about 30%, about 35%, about 40%, about 45%, about 50%, about 55%, about 60%, about 65%, about 70%, about 75%, about 80%, about 85%, about 90%, or about 95% as compared to a standard, e.g., the Factor XIIa and/or bradykinin production under the same conditions but in the absence of the protein.

[0283] In some embodiments, the protein includes one or more of the following characteristics: (a) a human CDR or human framework region; (b) the HC immunoglobulin variable domain sequence comprises one or more (e.g., 1, 2, or 3) CDRs that are at least 85, 88, 89, 90, 91, 92, 93, 94, 95, 96, 97, 98, 99, or 100% identical to a CDR of a HC variable domain described herein; (c) the LC immunoglobulin variable domain sequence comprises one or more (e.g., 1, 2, or 3) CDRs that are at least 85, 88, 89, 90, 91, 92, 93, 94, 95, 96, 97, 98, 99, or 100% identical to a CDR of a LC variable domain described herein; (d) the LC immunoglobulin variable domain sequence is at least 85, 88, 89, 90, 91, 92, 93, 94, 95, 96, 97, 98, 99, or 100% identical to a LC variable domain described herein (e.g., overall or in framework regions or CDRs); (e) the HC immunoglobulin variable domain sequence is at least 85, 88, 89, 90, 91, 92, 93, 94, 95, 96, 97, 98, 99, or 100% identical to a HC variable domain described herein (e.g., overall or in framework regions or CDRs); (f) the protein binds an epitope bound by a protein described herein, or competes for binding with a protein described herein; and (g) a primate CDR or primate framework region.

[0284] In some embodiments, the protein has an apparent inhibition constant (K_{i,app}) of less than 1000, 500, 100, 5, 1, 0.5 or 0.2 nM.

[0285] In some embodiments, the antibody does not bind prekallikrein (e.g., human prekallikrein and/or murine prekallikrein), but binds to the active form of plasma kallikrein (e.g., human plasma kallikrein and/or murine plasma kallikrein).

[0286] In a preferred embodiment, the protein is an antibody (e.g., a human antibody) having the light and heavy chains of antibodies selected from the group consisting of M162-A04, M199-A08, M160-G12, M142-H08, X63-G06, X101-A01, X81-B01, X67-D03, X67-G04, X115-B07, X115-D05, X115-E09, X115-H06, X115-A03, X115-D01, X115-F02, X-124-G01, X115-G04, M29-D09, M145-D11, M06-D09 and M35-G04.

[0287] In a preferred embodiment, the protein is an antibody (e.g., a human antibody) having the heavy chain of an antibody selected from the group consisting of: M162-A04, M199-A08, M160-G12, M142-H08, X63-G06, X101-A01, X81-B01, X67-D03, X67-G04, X115-B07, X115-D05, X115-E09, X115-H06, X115-A03, X115-D01, X115-F02, X124-G01, X115-G04, M29-D09, M145-D11, M06-D09 and M35-G04.

[0288] In a preferred embodiment, the protein is an antibody (e.g., a human antibody) having the light chain of an antibody selected from the group consisting of: M162-A04, M199-A08, M160-G12, M142-H08, X63-G06, X101-A01, X81-B01, X67-D03, X67-G04, X115-B07, X115-D05, X115-E09, X115-H06, X115-A03, X115-D01, X115-F02, X124-G01, X115-G04, M29-D09, M145-D11, M06-D09 and M35-G04.

[0289] In a preferred embodiment, the protein is an antibody (e.g., a human antibody) having light and heavy antibody variable regions of an antibody selected from the group consisting of M162-A04, M199-A08, M160-G12, M142-H08, X63-G06, X101-A01, X81-B01, X67-D03, X67-G04, X115-B07, X115-D05, X115-E09, X115-H06, X115-A03, X115-D01, X115-F02, X124-G01, X115-G04, M29-D09, M145-D11, M06-D09 and M35-G04.

[0290] In a preferred embodiment, the protein is an antibody (e.g., a human antibody) having a heavy chain antibody variable region of an antibody selected from the group consisting of: M162-A04, M199-A08, M160-G12, M142-H08, X63-G06, X101-A01, X81-B01, X67-D03, X67-G04, X115-B07, X115-D05, X115-E09, X115-H06, X115-A03, X115-D01, X115-F02, X124-G01, X115-G04, M29-D09, M145-D11, M06-D09 and M35-G04.

[0291] In a preferred embodiment, the protein is an antibody (e.g., a human antibody) having a light chain antibody variable region of an antibody selected from the group consisting of: M162-A04, M199-A08, M160-G12, M142-H08, X63-G06, X101-A01, X81-B01, X67-D03, X67-G04, X115-B07, X115-D05, X115-E09, X115-H06, X115-A03, X115-D01, X115-F02, X124-G01, X115-G04, M29-D09, M145-D11, M06-D09 and M35-G04.

[0292] In a preferred embodiment, the protein is an antibody (e.g., a human antibody) having one or more (e.g., 1, 2, or 3) heavy chain CDRs selected from the corresponding CDRs of the group of heavy chains consisting of M162-A04, M199-A08, M160-G12, M142-H08, X63-G06, X101-A01, X81-B01, X67-D03, X67-G04, X115-B07, X115-D05, X115-E09, X115-H06, X115-A03, X115-D01, X115-F02, X124-G01, X115-G04, M29-D09, M145-D11, M06-D09 and M35-G04.

[0293] In a preferred embodiment, the protein is an antibody (e.g., a human antibody) having one or more (e.g., 1, 2, or 3) light chain CDRs selected from the corresponding CDRs of the group of light chains consisting of M162-A04, M199-A08, M160-G12, M142-H08, X63-G06, X101-A01, X81-B01, X67-D03, X67-G04, X115-B07, X115-D05, X115-E09, X115-H06, X115-A03, X115-D01, X115-F02, X124-G01, X115-G04, M29-D09, M145-D11, M06-D09 and M35-G04.

[0294] In a preferred embodiment, the protein is an antibody (e.g., a human antibody) having one or more (e.g., 1, 2, or 3) heavy chain CDRs selected from the corresponding CDRs of the group of heavy chains consisting of M162-A04, M199-A08, M160-G12, M142-H08, X63-G06, X101-A01, X81-B01, X67-D03, X67-G04, X115-B07, X115-D05, X115-E09, X115-H06, X115-A03, X115-D01, X115-F02, X124-G01, X115-G04, M29-D09, M145-D11, M06-D09 and M35-G04 and one or more (e.g., 1, 2, or 3) light chain CDRs selected from the corresponding CDRs of the group of light chains consisting of M162-A04, M199-A08, M160-G12, M142-H08, X63-G06, X101-A01, X81-B01, X67-D03, X67-G04, X115-B07, X115-D05, X115-E09, X115-H06, X115-A03, X115-D01, X115-F02, X124-G01, X115-G04, M29-D09, M145-D11, M06-D09 and M35-G04 (respectively).

[0295] In a preferred embodiment, the protein is an antibody (e.g., a human antibody) having the light and heavy chains of X81-B01.

[0296] In a preferred embodiment, the protein is an antibody (e.g., a human antibody) having the heavy chain of X81-B01.

[0297] In a preferred embodiment, the protein is an antibody (e.g., a human antibody) having the light chain of X81-B01.

[0298] In a preferred embodiment, the protein is an antibody (e.g., a human antibody) having light and heavy antibody variable regions of an antibody selected from X81-B01.

[0299] In a preferred embodiment, the protein is an antibody (e.g., a human antibody) having a heavy chain antibody variable region of X81-B01.

[0300] In a preferred embodiment, the protein is an antibody (e.g., a human antibody) having a light chain antibody variable region of X81-B01.

[0301] In a preferred embodiment, the protein is an antibody (e.g., a human antibody) having one or more (e.g., 1, 2, or 3) heavy chain CDRs from the corresponding CDRs of the heavy chain of X81-B01.

[0302] In a preferred embodiment, the protein is an antibody (e.g., a human antibody) having one or more (e.g., 1, 2, or 3) light chain CDRs from the corresponding CDRs of the light chain of X81-B01.

[0303] In a preferred embodiment, the protein is an antibody (e.g., a human antibody) having one or more (e.g., 1, 2, or 3) heavy chain CDRs from the heavy chain of X81-B01 and one or more (e.g., 1, 2, or 3) light chain CDRs from the corresponding CDRs of the light chain of X81-B01.

[0304] In a preferred embodiment, the protein is an antibody (e.g., a human antibody) having the light and heavy chains of X67-D03.

[0305] In a preferred embodiment, the protein is an antibody (e.g., a human antibody) having the heavy chain of X67-D03.

[0306] In a preferred embodiment, the protein is an antibody (e.g., a human antibody) having the light chain of X67-D03.

[0307] In a preferred embodiment, the protein is an antibody (e.g., a human antibody) having light and heavy antibody variable regions of an antibody selected from X67-D03.

[0308] In a preferred embodiment, the protein is an antibody (e.g., a human antibody) having a heavy chain antibody variable region of X67-D03.

[0309] In a preferred embodiment, the protein is an antibody (e.g., a human antibody) having a light chain antibody variable region of X67-D03.

[0310] In a preferred embodiment, the protein is an antibody (e.g., a human antibody) having one or more (e.g., 1, 2, or 3) heavy chain CDRs from the corresponding CDRs of the heavy chain of X67-D03.

[0311] In a preferred embodiment, the protein is an antibody (e.g., a human antibody) having one or more (e.g., 1, 2, or 3) light chain CDRs from the corresponding CDRs of the light chain of X67-D03.

[0312] In a preferred embodiment, the protein is an antibody (e.g., a human antibody) having one or more (e.g., 1, 2, or 3) heavy chain CDRs from the heavy chain of X67-D03 and one or more (e.g., 1, 2, or 3) light chain CDRs from the corresponding CDRs of the light chain of X67-D03.

[0313] In a preferred embodiment, the protein is an antibody (e.g., a human antibody) having the light and heavy chains of X115-F02 or X124-G01.

[0314] In a preferred embodiment, the protein is an antibody (e.g., a human antibody) having the heavy chain of X115-F02 or X124-G01.

[0315] In a preferred embodiment, the protein is an antibody (e.g., a human antibody) having the light chain of X115-F02 or X124-G01.

[0316] In a preferred embodiment, the protein is an antibody (e.g., a human antibody) having light and heavy antibody variable regions of an antibody selected from X115-F02 or X124-G01.

[0317] In a preferred embodiment, the protein is an antibody (e.g., a human antibody) having a heavy chain antibody variable region of X115-F02 or X124-G01.

[0318] In a preferred embodiment, the protein is an antibody (e.g., a human antibody) having a light chain antibody variable region of X115-F02 or X124-G01.

[0319] In a preferred embodiment, the protein is an antibody (e.g., a human antibody) having one or more (e.g., 1, 2, or 3) heavy chain CDRs from the corresponding CDRs of the heavy chain of X115-F02 or X124-G01.

[0320] In a preferred embodiment, the protein is an antibody (e.g., a human antibody) having one or more (e.g., 1, 2, or 3) light chain CDRs from the corresponding CDRs of the light chain of X115-F02 or X124-G01.

[0321] In a preferred embodiment, the protein is an antibody (e.g., a human antibody) having one or more (e.g., 1, 2, or 3) heavy chain CDRs from the heavy chain of X115-F02 or X124-G01 and one or more (e.g., 1, 2, or 3) light chain CDRs from the corresponding CDRs of the light chain of X115-F02 or X124-G01.

[0322] In one embodiment, the HC and LC variable domain sequences are components of the same polypeptide chain.

[0323] In some embodiments, the plasma kallikrein binding protein has a serum residence time of 1 week, 2 weeks, 3 weeks, 4 weeks, 5 weeks or more, in vivo, e.g., in humans. In one embodiment, the plasma kallikrein binding protein is an IgG, e.g., an IgG1, IgG2, IgG3 or IgG4, that has a serum residence time of 1 week, 2 weeks, 3 weeks, 4 weeks, 5 weeks or more in vivo, e.g., in humans.

[0324] In some embodiments, the plasma kallikrein binding protein is physically associated with a moiety that improves serum residence time, e.g., a moiety described herein.

[0325] In another embodiment, the HC and LC variable domain sequences are components of different polypeptide chains. For example, the protein is an IgG, e.g., IgG1, IgG2, IgG3, or IgG4. The protein can be a soluble Fab (sFab).

[0326] In other implementations the protein includes a Fab2′, scFv, minibody, scFv::Fc fusion, Fab::HSA fusion, HSA::Fab fusion, Fab::HSA::Fab fusion, or other molecule that comprises the antigen combining site of one of the binding proteins herein. The VH and VL regions of these Fabs can be provided as IgG, Fab, Fab2, Fab2′, scFv, PEGylated Fab, PEGylated scFv, PEGylated Fab2, VH::CH1::HSA+LC, HSA::VH::CH1+LC, LC::HSA+VH::CH1, HSA::LC+VH::CH1, or other appropriate construction.

[0327] In one embodiment, the protein is a human or humanized antibody or is non-immunogenic in a human. For example, the protein includes one or more human antibody framework regions, e.g., all human framework regions.

[0328] In one embodiment, the protein includes a human Fc domain, or an Fc domain that is at least 95, 96, 97, 98, or 99% identical to a human Fc domain.

[0329] In one embodiment, the protein is a primate or primatized antibody or is non-immunogenic in a human. For example, the protein includes one or more primate antibody framework regions, e.g., all primate framework regions.

[0330] In one embodiment, the protein includes a primate Fc domain, or an Fc domain that is at least 95, 96, 97, 98, or 99% identical to a primate Fc domain. “Primate” includes humans (Homo sapiens), chimpanzees (Pan troglodytes and Pan paniscus (bonobos)), gorillas (Gorilla gorilla), gibons, monkeys, lemurs, aye-ayes (Daubentonia madagascariensis), and tarsiers.

[0331] In one embodiment, the protein includes human framework regions, or framework regions that are at least 95, 96, 97, 98, or 99% identical to human framework regions.

[0332] In certain embodiments, the protein includes no sequences from mice or rabbits (e.g., is not a murine or rabbit antibody).

[0333] In certain embodiments, the protein is capable of binding to a cell or tissue, e.g., that expresses plasma kallikrein.

[0334] In one embodiment, protein is physically associated with a nanoparticle, and can be used to guide a nanoparticle to a cell or tissue expressing plasma kallikrein.

[0335] In some aspects, the disclosure features a method of treating or preventing rheumatoid arthritis in a subject, the method comprising:
[0336] administering an isolated protein (e.g., antibody, e.g., human antibody) comprising a heavy chain immunoglobulin variable domain sequence and a light chain immunoglobulin variable domain sequence to the subject, wherein:
[0337] the heavy chain immunoglobulin variable domain sequence comprises one, two, or three (e.g., three) CDR regions from the heavy chain variable domain of a protein described herein, and/or
[0338] the light chain immunoglobulin variable domain sequence comprises one, two, or three (e.g., three) CDR regions from the light chain variable domain of a protein described herein,
[0339] wherein the protein binds to plasma kallikrein.

[0340] In some embodiments, the plasma kallikrein binding protein does not bind prekallikrein (e.g., human prekallikrein and/or murine prekallikrein), but binds to the active form of plasma kallikrein (e.g., human plasma kallikrein and/or murine plasma kallikrein).

[0341] In some embodiments, the protein is administered in combination with another treatment for rheumatoid arthritis.

[0342] In some embodiments, the protein inhibits plasma kallikrein (e.g., human plasma kallikrein and/or murine plasma kallikrein).

[0343] In some embodiments, the heavy chain immunoglobulin variable domain sequence comprises the heavy chain variable domain of a protein described herein, and/or the light chain immunoglobulin variable domain sequence comprises the light chain variable domain of a protein described herein.

[0344] In some embodiments, the protein comprises the heavy chain of a protein described herein, and/or the light chain of a protein described herein.

[0345] In some aspects, the disclosure features a method of treating or preventing gout in a subject, the method comprising:
[0346] administering an isolated protein (e.g., antibody, e.g., human antibody) comprising a heavy chain immunoglobulin variable domain sequence and a light chain immunoglobulin variable domain sequence to the subject, wherein:
[0347] the heavy chain immunoglobulin variable domain sequence comprises one, two, or three (e.g., three) CDR regions from the heavy chain variable domain of a protein described herein, and/or
[0348] the light chain immunoglobulin variable domain sequence comprises one, two, or three (e.g., three) CDR regions from the light chain variable domain of a protein described herein,
[0349] wherein the protein binds to plasma kallikrein.

[0350] In some embodiments, the plasma kallikrein binding protein does not bind prekallikrein (e.g., human prekallikrein and/or murine prekallikrein), but binds to the active form of plasma kallikrein (e.g., human plasma kallikrein and/or murine plasma kallikrein).

[0351] In some embodiments, the protein is administered in combination with another treatment for gout.

[0352] In some embodiments, the protein inhibits plasma kallikrein (e.g., human plasma kallikrein and/or murine plasma kallikrein).

[0353] In some embodiments, the heavy chain immunoglobulin variable domain sequence comprises the heavy chain variable domain of a protein described herein, and/or the light chain immunoglobulin variable domain sequence comprises the light chain variable domain of a protein described herein.

[0354] In some embodiments, the protein comprises the heavy chain of a protein described herein, and/or the light chain of a protein described herein.

[0355] In some aspects, the disclosure features a method of treating or preventing intestinal bowel disease in a subject, the method comprising:
[0356] administering an isolated protein (e.g., antibody, e.g., human antibody) comprising a heavy chain immunoglobulin variable domain sequence and a light chain immunoglobulin variable domain sequence to the subject, wherein:
[0357] the heavy chain immunoglobulin variable domain sequence comprises one, two, or three (e.g., three) CDR regions from the heavy chain variable domain of a protein described herein, and/or
[0358] the light chain immunoglobulin variable domain sequence comprises one, two, or three (e.g., three) CDR regions from the light chain variable domain of a protein described herein,
[0359] wherein the protein binds to plasma kallikrein.

[0360] In some embodiments, the plasma kallikrein binding protein does not bind prekallikrein (e.g., human prekallikrein and/or murine prekallikrein), but binds to the active form of plasma kallikrein (e.g., human plasma kallikrein and/or murine plasma kallikrein).

[0361] In some embodiments, the protein is administered in combination with another treatment for intestinal bowel disease.

[0362] In some embodiments, the protein inhibits plasma kallikrein (e.g., human plasma kallikrein and/or murine plasma kallikrein).

[0363] In some embodiments, the heavy chain immunoglobulin variable domain sequence comprises the heavy chain variable domain of a protein described herein, and/or the light chain immunoglobulin variable domain sequence comprises the light chain variable domain of a protein described herein.

[0364] In some embodiments, the protein comprises the heavy chain of a protein described herein, and/or the light chain of a protein described herein.

[0365] In some aspects, the disclosure features a method of treating or preventing oral mucositis in a subject, the method comprising:
[0366] administering an isolated protein (e.g., antibody, e.g., human antibody) comprising a heavy chain immunoglobulin variable domain sequence and a light chain immunoglobulin variable domain sequence to the subject, wherein:
[0367] the heavy chain immunoglobulin variable domain sequence comprises one, two, or three (e.g., three) CDR regions from the heavy chain variable domain of a protein described herein, and/or
[0368] the light chain immunoglobulin variable domain sequence comprises one, two, or three (e.g., three) CDR regions from the light chain variable domain of a protein described herein,
[0369] wherein the protein binds to plasma kallikrein.

[0370] In some embodiments, the plasma kallikrein binding protein does not bind prekallikrein (e.g., human prekallikrein and/or murine prekallikrein), but binds to the active form of plasma kallikrein (e.g., human plasma kallikrein and/or murine plasma kallikrein).

[0371] In some embodiments, the protein is administered in combination with another treatment for oral mucositis.

[0372] In some embodiments, the protein inhibits plasma kallikrein (e.g., human plasma kallikrein and/or murine plasma kallikrein).

[0373] In some embodiments, the heavy chain immunoglobulin variable domain sequence comprises the heavy chain variable domain of a protein described herein, and/or the light chain immunoglobulin variable domain sequence comprises the light chain variable domain of a protein described herein.

[0374] In some embodiments, the protein comprises the heavy chain of a protein described herein, and/or the light chain of a protein described herein.

[0375] In some aspects, the disclosure features a method of treating or preventing neuropathic pain in a subject, the method comprising:

[0376] administering an isolated protein (e.g., antibody, e.g., human antibody) comprising a heavy chain immunoglobulin variable domain sequence and a light chain immunoglobulin variable domain sequence to the subject, wherein:
[0377] the heavy chain immunoglobulin variable domain sequence comprises one, two, or three (e.g., three) CDR regions from the heavy chain variable domain of a protein described herein, and/or
[0378] the light chain immunoglobulin variable domain sequence comprises one, two, or three (e.g., three) CDR regions from the light chain variable domain of a protein described herein,
[0379] wherein the protein binds to plasma kallikrein.

[0380] In some embodiments, the plasma kallikrein binding protein does not bind prekallikrein (e.g., human prekallikrein and/or murine prekallikrein), but binds to the active form of plasma kallikrein (e.g., human plasma kallikrein and/or murine plasma kallikrein).

[0381] In some embodiments, the protein is administered in combination with another treatment for neuropathic pain.

[0382] In some embodiments, the protein inhibits plasma kallikrein (e.g., human plasma kallikrein and/or murine plasma kallikrein).

[0383] In some embodiments, the heavy chain immunoglobulin variable domain sequence comprises the heavy chain variable domain of a protein described herein, and/or the light chain immunoglobulin variable domain sequence comprises the light chain variable domain of a protein described herein.

[0384] In some embodiments, the protein comprises the heavy chain of a protein described herein, and/or the light chain of a protein described herein.

[0385] In some aspects, the disclosure features a method of treating or preventing inflammatory pain in a subject, the method comprising:
[0386] administering an isolated protein (e.g., antibody, e.g., human antibody) comprising a heavy chain immunoglobulin variable domain sequence and a light chain immunoglobulin variable domain sequence to the subject, wherein:
[0387] the heavy chain immunoglobulin variable domain sequence comprises one, two, or three (e.g., three) CDR regions from the heavy chain variable domain of a protein described herein, and/or
[0388] the light chain immunoglobulin variable domain sequence comprises one, two, or three (e.g., three) CDR regions from the light chain variable domain of a protein described herein,
[0389] wherein the protein binds to plasma kallikrein.

[0390] In some embodiments, the plasma kallikrein binding protein does not bind prekallikrein (e.g., human prekallikrein and/or murine prekallikrein), but binds to the active form of plasma kallikrein (e.g., human plasma kallikrein and/or murine plasma kallikrein).

[0391] In some embodiments, the protein is administered in combination with another treatment for inflammatory pain.

[0392] In some embodiments, the protein inhibits plasma kallikrein (e.g., human plasma kallikrein and/or murine plasma kallikrein).

[0393] In some embodiments, the heavy chain immunoglobulin variable domain sequence comprises the heavy chain variable domain of a protein described herein, and/or the light chain immunoglobulin variable domain sequence comprises the light chain variable domain of a protein described herein.

[0394] In some embodiments, the protein comprises the heavy chain of a protein described herein, and/or the light chain of a protein described herein.

[0395] In some aspects, the disclosure features a method of treating or preventing spinal stenosis-degenerative spine disease in a subject, the method comprising:
[0396] administering an isolated protein (e.g., antibody, e.g., human antibody) comprising a heavy chain immunoglobulin variable domain sequence and a light chain immunoglobulin variable domain sequence to the subject, wherein:
[0397] the heavy chain immunoglobulin variable domain sequence comprises one, two, or three (e.g., three) CDR regions from the heavy chain variable domain of a protein described herein, and/or
[0398] the light chain immunoglobulin variable domain sequence comprises one, two, or three (e.g., three) CDR regions from the light chain variable domain of a protein described herein,
[0399] wherein the protein binds to plasma kallikrein.

[0400] In some embodiments, the plasma kallikrein binding protein does not bind prekallikrein (e.g., human prekallikrein and/or murine prekallikrein), but binds to the active form of plasma kallikrein (e.g., human plasma kallikrein and/or murine plasma kallikrein).

[0401] In some embodiments, the protein is administered in combination with another treatment for spinal stenosis-degenerative spine disease.

[0402] In some embodiments, the protein inhibits plasma kallikrein (e.g., human plasma kallikrein and/or murine plasma kallikrein).

[0403] In some embodiments, the heavy chain immunoglobulin variable domain sequence comprises the heavy chain variable domain of a protein described herein, and/or the light chain immunoglobulin variable domain sequence comprises the light chain variable domain of a protein described herein.

[0404] In some embodiments, the protein comprises the heavy chain of a protein described herein, and/or the light chain of a protein described herein.

[0405] In some aspects, the disclosure features a method of treating or preventing arterial or venous thrombosis in a subject, the method comprising:
[0406] administering an isolated protein (e.g., antibody, e.g., human antibody) comprising a heavy chain immunoglobulin variable domain sequence and a light chain immunoglobulin variable domain sequence to the subject, wherein:
[0407] the heavy chain immunoglobulin variable domain sequence comprises one, two, or three (e.g., three) CDR regions from the heavy chain variable domain of a protein described herein, and/or
[0408] the light chain immunoglobulin variable domain sequence comprises one, two, or three (e.g., three) CDR regions from the light chain variable domain of a protein described herein,
[0409] wherein the protein binds to plasma kallikrein.

[0410] In some embodiments, the plasma kallikrein binding protein does not bind prekallikrein (e.g., human prekallikrein and/or murine prekallikrein), but binds to the active form of plasma kallikrein (e.g., human plasma kallikrein and/or murine plasma kallikrein).

[0411] In some embodiments, the protein is administered in combination with another treatment for arterial or venous thrombosis.

[0412] In some embodiments, the protein inhibits plasma kallikrein (e.g., human plasma kallikrein and/or murine plasma kallikrein).

[0413] In some embodiments, the heavy chain immunoglobulin variable domain sequence comprises the heavy chain variable domain of a protein described herein, and/or the light chain immunoglobulin variable domain sequence comprises the light chain variable domain of a protein described herein.

[0414] In some embodiments, the protein comprises the heavy chain of a protein described herein, and/or the light chain of a protein described herein.

[0415] In some aspects, the disclosure features a method of treating or preventing post operative ileus in a subject, the method comprising:
[0416] administering an isolated protein (e.g., antibody, e.g., human antibody) comprising a heavy chain immunoglobulin variable domain sequence and a light chain immunoglobulin variable domain sequence to the subject, wherein:
[0417] the heavy chain immunoglobulin variable domain sequence comprises one, two, or three (e.g., three) CDR regions from the heavy chain variable domain of a protein described herein, and/or
[0418] the light chain immunoglobulin variable domain sequence comprises one, two, or three (e.g., three) CDR regions from the light chain variable domain of a protein described herein,
[0419] wherein the protein binds to plasma kallikrein.

[0420] In some embodiments, the plasma kallikrein binding protein does not bind prekallikrein (e.g., human prekallikrein and/or murine prekallikrein), but binds to the active form of plasma kallikrein (e.g., human plasma kallikrein and/or murine plasma kallikrein).

[0421] In some embodiments, the protein is administered in combination with another treatment for post operative ileus.

[0422] In some embodiments, the protein inhibits plasma kallikrein (e.g., human plasma kallikrein and/or murine plasma kallikrein).

[0423] In some embodiments, the heavy chain immunoglobulin variable domain sequence comprises the heavy chain variable domain of a protein described herein, and/or the light chain immunoglobulin variable domain sequence comprises the light chain variable domain of a protein described herein.

[0424] In some embodiments, the protein comprises the heavy chain of a protein described herein, and/or the light chain of a protein described herein.

[0425] In some aspects, the disclosure features a method of treating or preventing aortic aneurysm in a subject, the method comprising:
[0426] administering an isolated protein (e.g., antibody, e.g., human antibody) comprising a heavy chain immunoglobulin variable domain sequence and a light chain immunoglobulin variable domain sequence to the subject, wherein:
[0427] the heavy chain immunoglobulin variable domain sequence comprises one, two, or three (e.g., three) CDR regions from the heavy chain variable domain of a protein described herein, and/or
[0428] the light chain immunoglobulin variable domain sequence comprises one, two, or three (e.g., three) CDR regions from the light chain variable domain of a protein described herein,
[0429] wherein the protein binds to plasma kallikrein.

[0430] In some embodiments, the plasma kallikrein binding protein does not bind prekallikrein (e.g., human prekallikrein and/or murine prekallikrein), but binds to the active form of plasma kallikrein (e.g., human plasma kallikrein and/or murine plasma kallikrein).

[0431] In some embodiments, the protein is administered in combination with another treatment for aortic aneurysm.

[0432] In some embodiments, the protein inhibits plasma kallikrein (e.g., human plasma kallikrein and/or murine plasma kallikrein).

[0433] In some embodiments, the heavy chain immunoglobulin variable domain sequence comprises the heavy chain variable domain of a protein described herein, and/or the light chain immunoglobulin variable domain sequence comprises the light chain variable domain of a protein described herein.

[0434] In some embodiments, the protein comprises the heavy chain of a protein described herein, and/or the light chain of a protein described herein.

[0435] In some aspects, the disclosure features a method of treating or preventing osteoarthritis in a subject, the method comprising:
[0436] administering an isolated protein (e.g., antibody, e.g., human antibody) comprising a heavy chain immunoglobulin variable domain sequence and a light chain immunoglobulin variable domain sequence to the subject, wherein:
[0437] the heavy chain immunoglobulin variable domain sequence comprises one, two, or three (e.g., three) CDR regions from the heavy chain variable domain of a protein described herein, and/or
[0438] the light chain immunoglobulin variable domain sequence comprises one, two, or three (e.g., three) CDR regions from the light chain variable domain of a protein described herein,
[0439] wherein the protein binds to plasma kallikrein.

[0440] In some embodiments, the plasma kallikrein binding protein does not bind prekallikrein (e.g., human prekallikrein and/or murine prekallikrein), but binds to the active form of plasma kallikrein (e.g., human plasma kallikrein and/or murine plasma kallikrein).

[0441] In some embodiments, the protein is administered in combination with another treatment for osteoarthritis.

[0442] In some embodiments, the protein inhibits plasma kallikrein (e.g., human plasma kallikrein and/or murine plasma kallikrein).

[0443] In some embodiments, the heavy chain immunoglobulin variable domain sequence comprises the heavy chain variable domain of a protein described herein, and/or the light chain immunoglobulin variable domain sequence comprises the light chain variable domain of a protein described herein.

[0444] In some embodiments, the protein comprises the heavy chain of a protein described herein, and/or the light chain of a protein described herein.

[0445] In some aspects, the disclosure features a method of treating or preventing vasculitis in a subject, the method comprising:
[0446] administering an isolated protein (e.g., antibody, e.g., human antibody) comprising a heavy chain immunoglobulin variable domain sequence and a light chain immunoglobulin variable domain sequence to the subject, wherein:
[0447] the heavy chain immunoglobulin variable domain sequence comprises one, two, or three (e.g., three) CDR regions from the heavy chain variable domain of a protein described herein, and/or
[0448] the light chain immunoglobulin variable domain sequence comprises one, two, or three (e.g., three) CDR regions from the light chain variable domain of a protein described herein,
[0449] wherein the protein binds to plasma kallikrein.

[0450] In some embodiments, the plasma kallikrein binding protein does not bind prekallikrein (e.g., human prekallikrein and/or murine prekallikrein), but binds to the active form of plasma kallikrein (e.g., human plasma kallikrein and/or murine plasma kallikrein).

[0451] In some embodiments, the protein is administered in combination with another treatment for vasculitis.

[0452] In some embodiments, the protein inhibits plasma kallikrein (e.g., human plasma kallikrein and/or murine plasma kallikrein).

[0453] In some embodiments, the heavy chain immunoglobulin variable domain sequence comprises the heavy chain variable domain of a protein described herein, and/or the light chain immunoglobulin variable domain sequence comprises the light chain variable domain of a protein described herein.

[0454] In some embodiments, the protein comprises the heavy chain of a protein described herein, and/or the light chain of a protein described herein.

[0455] In some aspects, the disclosure features a method of treating or preventing head trauma or peri-tumor brain edema in a subject, the method comprising:
[0456] administering an isolated protein (e.g., antibody, e.g., human antibody) comprising a heavy chain immunoglobulin variable domain sequence and a light chain immunoglobulin variable domain sequence to the subject, wherein:
[0457] the heavy chain immunoglobulin variable domain sequence comprises one, two, or three (e.g., three) CDR regions from the heavy chain variable domain of a protein described herein, and/or
[0458] the light chain immunoglobulin variable domain sequence comprises one, two, or three (e.g., three) CDR regions from the light chain variable domain of a protein described herein,
[0459] wherein the protein binds to plasma kallikrein.

[0460] In some embodiments, the plasma kallikrein binding protein does not bind prekallikrein (e.g., human prekallikrein and/or murine prekallikrein), but binds to the active form of plasma kallikrein (e.g., human plasma kallikrein and/or murine plasma kallikrein).

[0461] In some embodiments, the protein is administered in combination with another treatment for head trauma or peri-tumor brain edema.

[0462] In some embodiments, the protein inhibits plasma kallikrein (e.g., human plasma kallikrein and/or murine plasma kallikrein).

[0463] In some embodiments, the heavy chain immunoglobulin variable domain sequence comprises the heavy chain variable domain of a protein described herein, and/or the light chain immunoglobulin variable domain sequence comprises the light chain variable domain of a protein described herein.

[0464] In some embodiments, the protein comprises the heavy chain of a protein described herein, and/or the light chain of a protein described herein.

[0465] In some aspects, the disclosure features a method of treating or preventing sepsis in a subject, the method comprising:
[0466] administering an isolated protein (e.g., antibody, e.g., human antibody) comprising a heavy chain immunoglobulin variable domain sequence and a light chain immunoglobulin variable domain sequence to the subject, wherein:
[0467] the heavy chain immunoglobulin variable domain sequence comprises one, two, or three (e.g., three) CDR regions from the heavy chain variable domain of a protein described herein, and/or
[0468] the light chain immunoglobulin variable domain sequence comprises one, two, or three (e.g., three) CDR regions from the light chain variable domain of a protein described herein,
[0469] wherein the protein binds to plasma kallikrein.

[0470] In some embodiments, the plasma kallikrein binding protein does not bind prekallikrein (e.g., human prekallikrein and/or murine prekallikrein), but binds to the active form of plasma kallikrein (e.g., human plasma kallikrein and/or murine plasma kallikrein).

[0471] In some embodiments, the protein is administered in combination with another treatment for sepsis.

[0472] In some embodiments, the protein inhibits plasma kallikrein (e.g., human plasma kallikrein and/or murine plasma kallikrein).

[0473] In some embodiments, the heavy chain immunoglobulin variable domain sequence comprises the heavy chain variable domain of a protein described herein, and/or the light chain immunoglobulin variable domain sequence comprises the light chain variable domain of a protein described herein.

[0474] In some embodiments, the protein comprises the heavy chain of a protein described herein, and/or the light chain of a protein described herein.

[0475] In some aspects, the disclosure features a method of treating or preventing acute middle cerebral artery (MCA) ischemic event (stroke) in a subject, the method comprising:
[0476] administering an isolated protein (e.g., antibody, e.g., human antibody) comprising a heavy chain immunoglobulin variable domain sequence and a light chain immunoglobulin variable domain sequence to the subject, wherein:
[0477] the heavy chain immunoglobulin variable domain sequence comprises one, two, or three (e.g., three) CDR regions from the heavy chain variable domain of a protein described herein, and/or
[0478] the light chain immunoglobulin variable domain sequence comprises one, two, or three (e.g., three) CDR regions from the light chain variable domain of a protein described herein,
[0479] wherein the protein binds to plasma kallikrein.

[0480] In some embodiments, the plasma kallikrein binding protein does not bind prekallikrein (e.g., human prekallikrein and/or murine prekallikrein), but binds to the active form of plasma kallikrein (e.g., human plasma kallikrein and/or murine plasma kallikrein).

[0481] In some embodiments, the protein is administered in combination with another treatment for acute middle cerebral artery (MCA) ischemic event (stroke).

[0482] In some embodiments, the protein inhibits plasma kallikrein (e.g., human plasma kallikrein and/or murine plasma kallikrein).

[0483] In some embodiments, the heavy chain immunoglobulin variable domain sequence comprises the heavy chain variable domain of a protein described herein, and/or the light chain immunoglobulin variable domain sequence comprises the light chain variable domain of a protein described herein.

[0484] In some embodiments, the protein comprises the heavy chain of a protein described herein, and/or the light chain of a protein described herein.

[0485] In some aspects, the disclosure features a method of treating or preventing restenosis (e.g., after angioplasty) in a subject, the method comprising:
[0486] administering an isolated protein (e.g., antibody, e.g., human antibody) comprising a heavy chain immunoglobulin variable domain sequence and a light chain immunoglobulin variable domain sequence to the subject, wherein:
[0487] the heavy chain immunoglobulin variable domain sequence comprises one, two, or three (e.g., three) CDR regions from the heavy chain variable domain of a protein described herein, and/or
[0488] the light chain immunoglobulin variable domain sequence comprises one, two, or three (e.g., three) CDR regions from the light chain variable domain of a protein described herein,
[0489] wherein the protein binds to plasma kallikrein.

[0490] In some embodiments, the plasma kallikrein binding protein does not bind prekallikrein (e.g., human prekallikrein and/or murine prekallikrein), but binds to the active form of plasma kallikrein (e.g., human plasma kallikrein and/or murine plasma kallikrein).

[0491] In some embodiments, the protein is administered in combination with another treatment for restenosis (e.g., after angioplasty).

[0492] In some embodiments, the protein inhibits plasma kallikrein (e.g., human plasma kallikrein and/or murine plasma kallikrein).

[0493] In some embodiments, the heavy chain immunoglobulin variable domain sequence comprises the heavy chain variable domain of a protein described herein, and/or the light chain immunoglobulin variable domain sequence comprises the light chain variable domain of a protein described herein.

[0494] In some embodiments, the protein comprises the heavy chain of a protein described herein, and/or the light chain of a protein described herein.

[0495] In some aspects, the disclosure features a method of treating or preventing systemic lupus erythematosis nephritis in a subject, the method comprising:
[0496] administering an isolated protein (e.g., antibody, e.g., human antibody) comprising a heavy chain immunoglobulin variable domain sequence and a light chain immunoglobulin variable domain sequence to the subject, wherein:
[0497] the heavy chain immunoglobulin variable domain sequence comprises one, two, or three (e.g., three) CDR regions from the heavy chain variable domain of a protein described herein, and/or
[0498] the light chain immunoglobulin variable domain sequence comprises one, two, or three (e.g., three) CDR regions from the light chain variable domain of a protein described herein,
[0499] wherein the protein binds to plasma kallikrein.

[0500] In some embodiments, the plasma kallikrein binding protein does not bind prekallikrein (e.g., human prekallikrein and/or murine prekallikrein), but binds to the active form of plasma kallikrein (e.g., human plasma kallikrein and/or murine plasma kallikrein).

[0501] In some embodiments, the protein is administered in combination with another treatment for systemic lupus erythematosis nephritis.

[0502] In some embodiments, the protein inhibits plasma kallikrein (e.g., human plasma kallikrein and/or murine plasma kallikrein).

[0503] In some embodiments, the heavy chain immunoglobulin variable domain sequence comprises the heavy chain variable domain of a protein described herein, and/or the light chain immunoglobulin variable domain sequence comprises the light chain variable domain of a protein described herein.

[0504] In some embodiments, the protein comprises the heavy chain of a protein described herein, and/or the light chain of a protein described herein.

[0505] In some aspects, the disclosure features a method of treating or preventing burn injury in a subject, the method comprising:
[0506] administering an isolated protein (e.g., antibody, e.g., human antibody) comprising a heavy chain immunoglobulin variable domain sequence and a light chain immunoglobulin variable domain sequence to the subject, wherein:
[0507] the heavy chain immunoglobulin variable domain sequence comprises one, two, or three (e.g., three) CDR regions from the heavy chain variable domain of a protein described herein, and/or
[0508] the light chain immunoglobulin variable domain sequence comprises one, two, or three (e.g., three) CDR regions from the light chain variable domain of a protein described herein,
[0509] wherein the protein binds to plasma kallikrein.

[0510] In some embodiments, the plasma kallikrein binding protein does not bind prekallikrein (e.g., human prekallikrein and/or murine prekallikrein), but binds to the active form of plasma kallikrein (e.g., human plasma kallikrein and/or murine plasma kallikrein).

[0511] In some embodiments, the protein is administered in combination with another treatment for burn injury.

[0512] In some embodiments, the protein inhibits plasma kallikrein (e.g., human plasma kallikrein and/or murine plasma kallikrein).

[0513] In some embodiments, the heavy chain immunoglobulin variable domain sequence comprises the heavy chain variable domain of a protein described herein, and/or the light chain immunoglobulin variable domain sequence comprises the light chain variable domain of a protein described herein.

[0514] In some embodiments, the protein comprises the heavy chain of a protein described herein, and/or the light chain of a protein described herein.

[0515] In some aspects, the disclosure features a method of detecting plasma kallikrein in a sample, the method comprising: contacting the sample with a plasma kallikrein binding protein (e.g., a plasma kallikrein binding protein described herein); and detecting an interaction between the protein and the plasma kallikrein, if present.

[0516] In some embodiments, the protein includes a detectable label.

[0517] In some embodiments, the plasma kallikrein binding protein does not bind prekallikrein (e.g., human prekallikrein and/or murine prekallikrein), but binds to the active form of plasma kallikrein (e.g., human plasma kallikrein and/or murine plasma kallikrein). In some embodiments, the plasma kallikrein binding protein binds prekallikrein (e.g., human prekallikrein and/or murine prekallikrein) and the active form of plasma kallikrein (e.g., human plasma kallikrein and/or murine plasma kallikrein).

[0518] In some aspects, the disclosure features a method of detecting plasma kallikrein in a subject, the method comprising: administering a plasma kallikrein binding protein (e.g., a plasma kallikrein binding protein described herein) to a subject; and detecting an interaction between the protein and the plasma kallikrein in the subject, if present. For example, the detecting comprises imaging the subject.

[0519] In some embodiments, the protein further includes a detectable label.

[0520] In some embodiments, the plasma kallikrein binding protein does not bind prekallikrein (e.g., human prekallikrein and/or murine prekallikrein), but binds to the active form of plasma kallikrein (e.g., human plasma kallikrein and/or murine plasma kallikrein). In some embodiments, the plasma kallikrein binding protein binds prekallikrein (e.g., human prekallikrein and/or murine prekallikrein) and the active form of plasma kallikrein (e.g., human plasma kallikrein and/or murine plasma kallikrein).

[0521] In some aspects, the disclosure features a method of modulating plasma kallikrein activity, e.g., in a method of treating or preventing a plasma kallikrein associated disorder. The method includes: contacting plasma kallikrein with a plasma kallikrein binding protein (e.g., a plasma kallikrein binding protein described herein) (e.g., in a human subject), thereby modulating plasma kallikrein activity.

[0522] In some embodiments, the plasma kallikrein binding protein does not bind prekallikrein (e.g., human prekallikrein and/or murine prekallikrein), but binds to the active form of plasma kallikrein (e.g., human plasma kallikrein and/or murine plasma kallikrein).

[0523] In some embodiments, the plasma kallikrein associated disorder is selected from the group consisting of rheumatoid arthritis, gout, intestinal bowel disease, oral mucositis, neuropathic pain, inflammatory pain, spinal stenosis-degenerative spine disease, arterial or venous thrombosis, post operative ileus, aortic aneurysm, osteoarthritis, vasculitis, edema, hereditary angioedema, cerebral edema, pulmonary embolism, stroke, clotting induced by ventricular assistance devices or stents, head trauma or peri-tumor brain edema, sepsis, acute middle cerebral artery (MCA) ischemic event (stroke), restenosis (e.g., after angioplasty), systemic lupus erythematosis nephritis/vasculitis, and burn injury.

[0524] In some embodiments, the plasma kallikrein binding protein reduces abberent clotting associated with the contact activation system (i.e., intrinsic activation system) by at least 10% as measured by e.g., an APTT clotting assay. In other embodiments, the plasma kallikrein binding protein reduces abberent clotting associated with the contact activation system by at least 20%, at least 30%, at least 40%, at least 50%, at least 60%, at least 70%, at least 80%, at least 90%, at least 95%, at least 99%, or even 100% (i.e., no detectable abberent clotting).

[0525] In some aspects, the disclosure features a method of treating a plasma kallikrein associated disorder, the method comprising administering, to a subject, a plasma kallikrein binding protein (e.g., a plasma kallikrein binding protein described herein) in an amount sufficient to treat a plasma kallikrein associated disorder in the subject. The method can further include providing to the subject a second therapy that is therapy for the plasma kallikrein associated disorder, e.g., as described herein.

[0526] In some embodiments, the plasma kallikrein associated disorder is selected from the group consisting of rheumatoid arthritis, gout, intestinal bowel disease, oral mucositis, neuropathic pain, inflammatory pain, spinal stenosis-degenerative spine disease, arterial or venous thrombosis, post operative ileus, aortic aneurysm, osteoarthritis, vasculitis, edema, hereditary angioedema, cerebral edema, pulmonary embolism, stroke, clotting induced by ventricular assistance devices or stents, head trauma or peri-tumor brain edema, sepsis, acute middle cerebral artery (MCA) ischemic event (stroke), restenosis (e.g., after angioplasty), systemic lupus erythematosis nephritis/vasculitis, and burn injury.

[0527] In some aspects, the disclosure features a method of imaging a subject. The method includes administering a plasma kallikrein binding protein (e.g., a plasma kallikrein binding protein described herein) to the subject, and e.g., detecting an interaction between the protein and the plasma kallikrein in the subject, if present.

[0528] In some embodiments, the plasma kallikrein binding protein does not bind prekallikrein (e.g., human prekallikrein and/or murine prekallikrein), but binds to the active form of plasma kallikrein (e.g., human plasma kallikrein and/or murine plasma kallikrein). In some embodiments, the plasma kallikrein binding protein binds prekallikrein (e.g., human prekallikrein and/or murine prekallikrein) and the active form of plasma kallikrein (e.g., human plasma kallikrein and/or murine plasma kallikrein).

[0529] In some embodiments, the protein does not inhibit plasma kallikrein activity.

[0530] In some embodiments, the protein inhibits plasma kallikrein activity (e.g., human plasma kallikrein and/or murine plasma kallikrein).

[0531] In some embodiments, the plasma kallikrein binding protein may include a detectable label (e.g., a radionuclide or an MRI-detectable label).

[0532] In some embodiments, the subject has or is suspected of having a plasma kallikrein associated disorder. The method is useful, e.g., for diagnosis of a plasma kallikrein associated disorder.

[0533] In some embodiments, the plasma kallikrein associated disorder is selected from the group consisting of rheumatoid arthritis, gout, intestinal bowel disease, oral mucositis, neuropathic pain, inflammatory pain, spinal stenosis-degenerative spine disease, arterial or venous thrombosis, post operative ileus, aortic aneurysm, osteoarthritis, vasculitis, edema, hereditary angioedema, cerebral edema, pulmonary embolism, stroke, clotting induced by ventricular assistance devices or stents, head trauma or peri-tumor brain edema, sepsis, acute middle cerebral artery (MCA) ischemic event (stroke), restenosis (e.g., after angioplasty), systemic lupus erythematosis nephritis, and burn injury.

[0534] In some embodiments, the plasma kallikrein binding protein reduces abberent clotting associated with the contact activation system (i.e., intrinsic activation system) by at least 10% as measured by e.g., an APTT clotting assay (e.g., by at least 20%, at least 30%, at least 40%, at least 50%, at least 60%, at least 70%, at least 80%, at least 90%, at least 95%, at least 99%, or even 100% (i.e., no detectable abberent clotting)).

[0535] In some aspects, the disclosure features a method of imaging plasma kallikrein, e.g., in a subject or sample (e.g., biopsy sample). The method includes administering a plasma kallikrein binding protein (e.g., a plasma kallikrein binding protein described herein), e.g., to the subject or the sample, and detecting an interaction between the protein and the plasma kallikrein, if present.

[0536] In some embodiments, the plasma kallikrein binding protein does not bind prekallikrein (e.g., human prekallikrein and/or murine prekallikrein), but binds to the active form of plasma kallikrein (e.g., human plasma kallikrein and/or murine plasma kallikrein). In some embodiments, the plasma kallikrein binding protein binds prekallikrein (e.g., human prekallikrein and/or murine prekallikrein) and the active form of plasma kallikrein (e.g., human plasma kallikrein and/or murine plasma kallikrein).

[0537] In some embodiments, the protein does not inhibit plasma kallikrein activity.

[0538] In some embodiments, the protein inhibits plasma kallikrein activity (e.g., human plasma kallikrein and/or murine plasma kallikrein).

[0539] In some embodiments, the plasma kallikrein binding protein may include a detectable label (e.g., a radionuclide or an MRI-detectable label).

[0540] In some embodiments, the subject has or is suspected of having a plasma kallikrein associated disorder. The method is useful, e.g., for diagnosis of a plasma kallikrein associated disorder.

[0541] In some embodiments, the plasma kallikrein associated disorder is selected from the group consisting of rheumatoid arthritis, gout, intestinal bowel disease, oral mucositis, neuropathic pain, inflammatory pain, spinal stenosis-degenerative spine disease, arterial or venous thrombosis, post operative ileus, aortic aneurysm, osteoarthritis, vasculitis, edema, hereditary angioedema, cerebral edema, pulmonary embolism, stroke, clotting induced by ventricular assistance devices or stents, head trauma or peri-tumor brain edema, sepsis, acute middle cerebral artery (MCA) ischemic event (stroke), restenosis (e.g., after angioplasty), systemic lupus erythematosis nephritis, and burn injury.

[0542] In some embodiments, the plasma kallikrein binding protein reduces abberent clotting associated with the contact activation system (i.e., intrinsic activation system) by at least 10% as measured by e.g., an APTT clotting assay (e.g., by at least 20%, at least 30%, at least 40%, at least 50%, at least 60%, at least 70%, at least 80%, at least 90%, at least 95%, at least 99%, or even 100% (i.e., no detectable abberent clotting)).

[0543] In one aspect, the disclosure features the use of a plasma kallikrein binding protein described herein for the treatment of a disorder described herein, e.g., rheumatoid arthritis, gout, intestinal bowel disease, oral mucositis, neuropathic pain, inflammatory pain, spinal stenosis-degenerative spine disease, arterial or venous thrombosis, post operative ileus, aortic aneurysm, osteoarthritis, vasculitis, edema, hereditary angioedema, cerebral edema, pulmonary embolism, stroke, clotting induced by ventricular assistance devices or stents, head trauma or peri-tumor brain edema, sepsis, acute middle cerebral artery (MCA) ischemic event (stroke), restenosis (e.g., after angioplasty), systemic lupus erythematosis nephritis, or burn injury; or to promote wound healing.

[0544] In some embodiments, the plasma kallikrein binding protein does not bind prekallikrein (e.g., human prekallikrein and/or murine prekallikrein), but binds to the active form of plasma kallikrein (e.g., human plasma kallikrein and/or murine plasma kallikrein). In some embodiments, the plasma kallikrein binding protein binds prekallikrein (e.g., human prekallikrein and/or murine prekallikrein) and the active form of plasma kallikrein (e.g., human plasma kallikrein and/or murine plasma kallikrein).

[0545] In one aspect, the disclosure features the use of a plasma kallikrein binding protein described herein for the manufacture of a medicament for the treatment of a disorder described herein, e.g., rheumatoid arthritis, gout, intestinal bowel disease, oral mucositis, neuropathic pain, inflammatory pain, spinal stenosis-degenerative spine disease, arterial or venous thrombosis, post operative ileus, aortic aneurysm, osteoarthritis, vasculitis, edema, hereditary angioedema, cerebral edema, pulmonary embolism, stroke, clotting induced by ventricular assistance devices or stents, head trauma or peri-tumor brain edema, sepsis, acute middle cerebral artery (MCA) ischemic event (stroke), restenosis (e.g., after angioplasty), systemic lupus erythematosis nephritis, or burn injury; or for the manufacture of a medicament for wound healing.

[0546] In some embodiments, the plasma kallikrein binding protein reduces abberent clotting associated with the contact activation system (i.e., intrinsic activation system) by at least 10% as measured by e.g., an APTT clotting assay (e.g., by at least 20%, at least 30%, at least 40%, at least 50%, at least 60%, at least 70%, at least 80%, at least 90%, at least 95%, at least 99%, or even 100% (i.e., no detectable abberent clotting)).

[0547] In some embodiments, the plasma kallikrein binding protein does not bind prekallikrein (e.g., human prekallikrein and/or murine prekallikrein), but binds to the active form of plasma kallikrein (e.g., human plasma kallikrein and/or murine plasma kallikrein).

[0548] The details of one or more embodiments of the invention are set forth in the accompanying drawings and the description below. Other features, objects, and advantages of the invention will be apparent from the description and drawings, and from the claims.

[0549] The contents of all cited references including literature references, issued patents, published or non-published patent applications cited throughout this application as well as those listed below are hereby expressly incorporated by reference in their entireties. In case of conflict, the present application, including any definitions herein, will control.

### BRIEF DESCRIPTION OF DRAWINGS

[0550] FIG. 1 is a schematic representation of the role of plasma kallikrein (pKal) in intrinsic coagulation pathway and inflammation.

[0551] FIG. 2 depicts the effect of M162-A04 on carrageenan-induced rat paw edema. Paw swelling was measured by water displacement.

[0552] FIG. 3 depicts the effect of M162-A04 on carrageenan-induced thermal hyperalgesia. Pain latency was measured by the Hargreaves method after carrageenan injection.

[0553] FIG. 4 depicts the alignment of the light chain DNA sequence of nongermlined (X63-G06) and germlined, codon optimized (X81-B01) versions of the same antibody discovered using ROLIC affinity maturation. Positions indicated with an asterisk (*) are conserved, whereas blank spaces correspond to bases changed in X81-B01 due to either codon optimization or germlining.

[0554] FIG. 5 depicts the alignment of the light chain amino acid sequence of nongermlined (X63-G06) and germlined, codon optimized (X81-B01) versions of the same antibody discovered using ROLIC affinity maturation. Positions indicated with an asterisk (*) are conserved, whereas blank spaces correspond to amino acids changed in X81-B01 due to germlining. A total of 11 amino acids differ between the nongermlined (X63-G06) and germlined, codon optimized antibody (X81-B01).

[0555] FIG. 6 depicts the alignment of the heavy chain DNA sequence of nongermlined (X63-G06) and germlined, codon optimized (X81-B01) versions of the same antibody discovered using ROLIC affinity maturation. Positions indicated with an asterisk (*) are conserved, whereas blank spaces correspond to DNA bases changed in X81-B01 due to codon optimization.

[0556] FIG. 7 depicts the alignment of the heavy chain amino acid sequence of nongermlined (X63-G06) and germlined, codon optimized (X81-B01) versions of the same antibody discovered using ROLIC affinity maturation. Positions indicated with an asterisk (*) are conserved. The two antibodies have the same amino acid sequence in the heavy chain.

[0557] FIG. 8A depicts the EPI-KAL2 competition for X81-B01 binding pKal. X81-B01 (IgG) was captured on an anti-human Fc fragment specific surface of a CM5 BIACORE® chip. pKal (100 nM) was flowed over the surface in the presence (lower sensorgram in the figure) or absence of 1 μM EPI-KAL2 (upper sensorgram in the figure).

[0558] FIG. 8B depicts the EPI-KAL2 competition for X67-D03 binding pKal. X67-D03 (IgG) was captured on an anti-human Fc fragment specific surface of a CM5 Biacore chip. pKal (100 nM) was flowed over the surface in the presence (lower sensorgram in the figure) or absence of 1 μM EPI-KAL2 (upper sensorgram in the figure).

[0559] FIG. 9 depicts the results of CLIPS epitope mapping for antibodies listed in Table 12.

[0560] FIGS. 10A-10C depict ClustalW alignment of pKal sequences from different species. Positions indicated by a “*” are conserved positions between, whereas positions indicated “:” indicate conservative substitutions between species. Positions indicated by a “.” have nonconservative substitutions in some species. Stretches of amino acids indicated by the symbol “@” were shown to be highly solvent exposed by solvent accessible surface area calculation. Stretches of amino acids indicated by a “+” were identified as potential epitopes of antibodies listed in Table 12. Amino acids highlighted in grey were found by solvent accessible surface area calculation to be buried when complexed with a Kunitz domain active site inhibitor. The underlined positions are the amino acids that form the catalytic triad (His434, Asp483, and Ser578, numbering based on the human sequence).

[0561] FIGS. 11A and 11B depict a Biacore competition analysis with epi-kal2, as described herein in Example 12, for (i) DX-2922, and (ii) M6-D09 antibodies.

[0562] FIG. 12 depicts a Biacore competition analysis with AEBSF, as described herein in Example 12, for (i) DX-2911, and (ii) M6-D09 antibodies.

[0563] FIG. 13 depicts a Biocore analysis showing that DX-2922 binds to plasma kallikrein that bound to high molecular weight kininogen (HMWK).

[0564] FIG. 14 depicts a graph showing dose dependent inhibition of edema by X101-A01 in carrageenan-induced paw edema (CPE) in rats.

[0565] FIG. 15 depicts a graph showing dose dependent inhibition of edema by intraperitoneal administration DX-2930 in carrageenan-induced paw edema in the rat.

[0566] FIG. 16 depicts a graph showing dose dependent inhibition of edema by subcutaneous administration DX-2930 in carrageenan-induced paw edema in the rat.

[0567] FIG. 17 depicts a graph showing mean DX-2930 serum concentrations following IV and SC administration to Sprague-Dawley rats for pharmacokinetic assessments.

[0568] FIG. 18 depicts a graph showing mean DX-2930 serum concentrations following IV and SC administration to cynomolgus monkeys for pharmacokinetic assessments.

### DETAILED DESCRIPTION

### Definitions

[0569] For convenience, before further description of the present invention, certain terms employed in the specification, examples and appended claims are defined here. Other terms are defined as they appear in the specification.

[0570] The singular forms “a”, “an”, and “the” include plural references unless the context clearly dictates otherwise.

[0571] The term “agonist,” as used herein, is meant to refer to an agent that mimics or up-regulates (e.g., potentiates or supplements) the bioactivity of a protein. An agonist can be a wild-type protein or derivative thereof having at least one bioactivity of the wild-type protein. An agonist can also be a compound which increases at least one bioactivity of a protein. An agonist can also be a compound which increases the interaction of a polypeptide with another molecule, e.g., a target peptide or nucleic acid.

[0572] “Antagonist” as used herein is meant to refer to an agent that downregulates (e.g., suppresses or inhibits) at least one bioactivity of a protein. An antagonist can be a compound which inhibits or decreases the interaction between a protein and another molecule, e.g., a target peptide or enzyme substrate. An antagonist can also be a compound which reduces the amount of expressed protein present.

[0573] The term “antibody” refers to a protein that includes at least one immunoglobulin variable domain (variable region) or immunoglobulin variable domain (variable region) sequence. For example, an antibody can include a heavy (H) chain variable region (abbreviated herein as VH or HV), and a light (L) chain variable region (abbreviated herein as VL or LV). In another example, an antibody includes two heavy (H) chain variable regions and two light (L) chain variable regions. The term “antibody” encompasses antigen-binding fragments of antibodies (e.g., single chain antibodies, Fab and sFab fragments, F(ab′)₂, Fd fragments, Fv fragments, scFv, and domain antibodies (dAb) fragments (de Wildt et al., Eur J Immunol. 1996; 26(3): 629-39)) as well as complete antibodies. An antibody can have the structural features of IgA, IgG, IgE, IgD, IgM (as well as subtypes thereof). Antibodies may be from any source, but primate (human and non-human primate) and primatized are preferred.

[0574] The VH and VL regions can be further subdivided into regions of hypervariability, termed “complementarity determining regions” (“CDRs”), interspersed with regions that are more conserved, termed “framework regions” (“FRs”). The extent of the framework region and CDRs have been defined (see, Kabat, E. A., et al. (1991) Sequences of Proteins of Immunological Interest, Fifth Edition, U.S. Department of Health and Human Services, NIH Publication No. 91-3242, and Chothia, C. et al. (1987) J. Mol. Biol. 196:901-917). Kabat definitions are used herein. Each VH and VL is typically composed of three CDRs and four FRs, arranged from amino-terminus to carboxy-terminus in the following order: FR1, CDR1, FR2, CDR2, FR3, CDR3, FR4.

[0575] As used herein, an “immunoglobulin variable domain sequence” refers to an amino acid sequence which can form the structure of an immunoglobulin variable domain such that one or more CDR regions are positioned in a conformation suitable for an antigen binding site. For example, the sequence may include all or part of the amino acid sequence of a naturally-occurring variable domain. For example, the sequence may omit one, two or more N- or C-terminal amino acids, internal amino acids, may include one or more insertions or additional terminal amino acids, or may include other alterations. In one embodiment, a polypeptide that includes immunoglobulin variable domain sequence can associate with another immunoglobulin variable domain sequence to form an antigen binding site, e.g., a structure that preferentially interacts with plasma kallikrein.

[0576] The VH or VL chain of the antibody can further include all or part of a heavy or light chain constant region, to thereby form a heavy or light immunoglobulin chain, respectively. In one embodiment, the antibody is a tetramer of two heavy immunoglobulin chains and two light immunoglobulin chains, wherein the heavy and light immunoglobulin chains are inter-connected by, e.g., disulfide bonds. In IgGs, the heavy chain constant region includes three immunoglobulin domains, CH1, CH2 and CH3. The light chain constant region includes a CL domain. The variable region of the heavy and light chains contains a binding domain that interacts with an antigen. The constant regions of the antibodies typically mediate the binding of the antibody to host tissues or factors, including various cells of the immune system (e.g., effector cells) and the first component (Clq) of the classical complement system. The light chains of the immunoglobulin may be of types kappa or lambda. In one embodiment, the antibody is glycosylated. An antibody can be functional for antibody-dependent cytotoxicity and/or complement-mediated cytotoxicity.

[0577] One or more regions of an antibody can be human or effectively human. For example, one or more of the variable regions can be human or effectively human. For example, one or more of the CDRs can be human, e.g., HC CDR1, HC CDR2, HC CDR3, LC CDR1, LC CDR2, and/or LC CDR3. Each of the light chain (LC) and/or heavy chain (HC) CDRs can be human. HC CDR3 can be human. One or more of the framework regions can be human, e.g., FR1, FR2, FR3, and/or FR4 of the HC and/or LC. For example, the Fc region can be human. In one embodiment, all the framework regions are human, e.g., derived from a human somatic cell, e.g., a hematopoietic cell that produces immunoglobulins or a non-hematopoietic cell. In one embodiment, the human sequences are germline sequences, e.g., encoded by a germline nucleic acid. In one embodiment, the framework (FR) residues of a selected Fab can be converted to the amino-acid type of the corresponding residue in the most similar primate germline gene, especially the human germline gene. One or more of the constant regions can be human or effectively human. For example, at least 70, 75, 80, 85, 90, 92, 95, 98, or 100% of an immunoglobulin variable domain, the constant region, the constant domains (CH1, CH2, CH3, and/or CL1), or the entire antibody can be human or effectively human.

[0578] All or part of an antibody can be encoded by an immunoglobulin gene or a segment thereof. Exemplary human immunoglobulin genes include the kappa, lambda, alpha (IgA1 and IgA2), gamma (IgG1, IgG2, IgG3, IgG4), delta, epsilon and mu constant region genes, as well as the many immunoglobulin variable region genes. Full-length immunoglobulin “light chains” (about 25 KDa or about 214 amino acids) are encoded by a variable region gene at the NH2-terminus (about 110 amino acids) and a kappa or lambda constant region gene at the COOH-terminus. Full-length immunoglobulin “heavy chains” (about 50 KDa or about 446 amino acids), are similarly encoded by a variable region gene (about 116 amino acids) and one of the other aforementioned constant region genes, e.g., gamma (encoding about 330 amino acids). The length of human HC varies considerably because HC CDR3 varies from about 3 amino-acid residues to over 35 amino-acid residues.

[0579] The term “antigen-binding fragment” of a full length antibody refers to one or more fragments of a full-length antibody that retain the ability to specifically bind to a target of interest. Examples of binding fragments encompassed within the term “antigen-binding fragment” of a full length antibody and that retain functionality include (i) a Fab fragment, a monovalent fragment consisting of the VL, VH, CL and CH1 domains; (ii) a F(ab′)₂ fragment, a bivalent fragment including two Fab fragments linked by a disulfide bridge at the hinge region; (iii) a Fd fragment consisting of the VH and CH1 domains; (iv) a Fv fragment consisting of the VL and VH domains of a single arm of an antibody, (v) a dAb fragment (Ward et al., (1989) Nature 341:544-546), which consists of a VH domain; and (vi) an isolated complementarity determining region (CDR). Furthermore, although the two domains of the Fv fragment, VL and VH, are coded for by separate genes, they can be joined, using recombinant methods, by a synthetic linker that enables them to be made as a single protein chain in which the VL and VH regions pair to form monovalent molecules known as single chain Fv (scFv). See e.g., U.S. Pat. Nos. 5,260,203, 4,946,778, and 4,881,175; Bird et al. (1988) Science 242:423-426; and Huston et al. (1988) Proc. Natl. Acad. Sci. USA 85:5879-5883.

[0580] Antibody fragments can be obtained using any appropriate technique including conventional techniques known to those with skill in the art. The term “monospecific antibody” refers to an antibody that displays a single binding specificity and affinity for a particular target, e.g., epitope. This term includes a “monoclonal antibody” or “monoclonal antibody composition,” which as used herein refers to a preparation of antibodies or fragments thereof of single molecular composition, irrespective of how the antibody was generated.

[0581] Antibodies are “germlined” by reverting one or more non-germline amino acids in framework regions to corresponding germline amino acids of the antibody, so long as binding properties are substantially retained.

[0582] The inhibition constant (Ki) provides a measure of inhibitor potency; it is the concentration of inhibitor required to reduce enzyme activity by half and is not dependent on enzyme or substrate concentrations. The apparent Ki (K_{i,app}) is obtained at different substrate concentrations by measuring the inhibitory effect of different concentrations of inhibitor (e.g., inhibitory binding protein) on the extent of the reaction (e.g., enzyme activity); fitting the change in pseudo-first order rate constant as a function of inhibitor concentration to the Morrison equation (Equation 1) yields an estimate of the apparent Ki value. The Ki is obtained from the y-intercept extracted from a linear regression analysis of a plot of Ki,app versus substrate concentration.

$$v = {v}_{0} - {v}_{0} ( \frac{( {K}_{i , app} + I + E ) - \sqrt{{( {K}_{i , app} + I + E )}^{2} - 4 \cdot I \cdot E}}{2 \cdot E} ) \qquad Equation 1$$

[0583] Where v=measured velocity; v₀=velocity in the absence of inhibitor; K_{i,app}=apparent inhibition constant; I=total inhibitor concentration; and E=total enzyme concentration.

[0584] As used herein, “binding affinity” refers to the apparent association constant or K_{A}. The K_{A} is the reciprocal of the dissociation constant (K_{D}). A binding protein may, for example, have a binding affinity of at least 10⁵, 10⁶, 10⁷, 10⁸, 10⁹, 10¹⁰ and 10¹¹ M⁻¹ for a particular target molecule, e.g., plasma kallikrein. Higher affinity binding of a binding protein to a first target relative to a second target can be indicated by a higher K_{A} (or a smaller numerical value K_{D}) for binding the first target than the K_{A} (or numerical value K_{D}) for binding the second target. In such cases, the binding protein has specificity for the first target (e.g., a protein in a first conformation or mimic thereof) relative to the second target (e.g., the same protein in a second conformation or mimic thereof; or a second protein). Differences in binding affinity (e.g., for specificity or other comparisons) can be at least 1.5, 2, 3, 4, 5, 10, 15, 20, 37.5, 50, 70, 80, 91, 100, 500, 1000, 10,000 or 10⁵ fold.

[0585] Binding affinity can be determined by a variety of methods including equilibrium dialysis, equilibrium binding, gel filtration, ELISA, surface plasmon resonance, or spectroscopy (e.g., using a fluorescence assay). Exemplary conditions for evaluating binding affinity are in HBS-P buffer (10 mM HEPES pH7.4, 150 mM NaCl, 0.005% (v/v) Surfactant P20). These techniques can be used to measure the concentration of bound and free binding protein as a function of binding protein (or target) concentration. The concentration of bound binding protein ([Bound]) is related to the concentration of free binding protein ([Free]) and the concentration of binding sites for the binding protein on the target where (N) is the number of binding sites per target molecule by the following equation:

$$[ Bound ] = N \cdot [ Free ] / ( ( 1 / {K}_{A} ) + [ Free ] ) .$$

[0586] It is not always necessary to make an exact determination of K_{A}, though, since sometimes it is sufficient to obtain a quantitative measurement of affinity, e.g., determined using a method such as ELISA or FACS analysis, is proportional to K_{A}, and thus can be used for comparisons, such as determining whether a higher affinity is, e.g., 2-fold higher, to obtain a qualitative measurement of affinity, or to obtain an inference of affinity, e.g., by activity in a functional assay, e.g., an in vitro or in vivo assay.

[0587] The term “binding protein” refers to a protein that can interact with a target molecule. This term is used interchangeably with “ligand.” A “plasma kallikrein binding protein” refers to a protein that can interact with (e.g., bind) plasma kallikrein, and includes, in particular, proteins that preferentially or specifically interact with and/or inhibit plasma kallikrein. A protein inhibits plasma kallikrein if it causes a decrease in the activity of plasma kallikrein as compared to the activity of plasma kallikrein in the absence of the protein and under the same conditions. In some embodiments, the plasma kallikrein binding protein is an antibody.

[0588] A “conservative amino acid substitution” is one in which the amino acid residue is replaced with an amino acid residue having a similar side chain. Families of amino acid residues having similar side chains have been defined in the art. These families include amino acids with basic side chains (e.g., lysine, arginine, histidine), acidic side chains (e.g., aspartic acid, glutamic acid), uncharged polar side chains (e.g., glycine, asparagine, glutamine, serine, threonine, tyrosine, cysteine), nonpolar side chains (e.g., alanine, valine, leucine, isoleucine, proline, phenylalanine, methionine, tryptophan), beta-branched side chains (e.g., threonine, valine, isoleucine) and aromatic side chains (e.g., tyrosine, phenylalanine, tryptophan, histidine).

[0589] It is possible for one or more framework and/or CDR amino acid residues of a binding protein to include one or more mutations (e.g., substitutions (e.g., conservative substitutions or substitutions of non-essential amino acids), insertions, or deletions) relative to a binding protein described herein. A plasma kallikrein binding protein may have mutations (e.g., substitutions (e.g., conservative substitutions or substitutions of non-essential amino acids), insertions, or deletions) (e.g., at least one, two, three, or four, and/or less than 15, 12, 10, 9, 8, 7, 6, 5, 4, 3, or 2 mutations) relative to a binding protein described herein, e.g., mutations which do not have a substantial effect on protein function. The mutations can be present in framework regions, CDRs, and/or constant regions. In some embodiments, the mutations are present in a framework region. In some embodiments, the mutations are present in a CDR. In some embodiments, the mutations are present in a constant region. Whether or not a particular substitution will be tolerated, i.e., will not adversely affect biological properties, such as binding activity, can be predicted, e.g., by evaluating whether the mutation is conservative or by the method of Bowie, et al. (1990) Science 247:1306-1310.

[0590] Motif sequences for biopolymers can include positions which can be varied amino acids. For example, the symbol “X” in such a context generally refers to any amino acid (e.g., any of the twenty natural amino acids) unless otherwise specified, e.g., to refer to any non-cysteine amino acid. Other allowed amino acids can also be indicated for example, using parentheses and slashes. For example, “(A/W/F/N/Q)” means that alanine, tryptophan, phenylalanine, asparagine, and glutamine are allowed at that particular position.

[0591] An “effectively human” immunoglobulin variable region is an immunoglobulin variable region that includes a sufficient number of human framework amino acid positions such that the immunoglobulin variable region does not elicit an immunogenic response in a normal human. An “effectively human” antibody is an antibody that includes a sufficient number of human amino acid positions such that the antibody does not elicit an immunogenic response in a normal human.

[0592] An “epitope” refers to the site on a target compound that is bound by a binding protein (e.g., an antibody such as a Fab or full length antibody). In the case where the target compound is a protein, the site can be entirely composed of amino acid components, entirely composed of chemical modifications of amino acids of the protein (e.g., glycosyl moieties), or composed of combinations thereof. Overlapping epitopes include at least one common amino acid residue, glycosyl group, phosphate group, sulfate group, or other molecular feature.

[0593] A first binding protein (e.g., antibody) “binds to the same epitope” as a second binding protein (e.g., antibody) if the first binding protein binds to the same site on a target compound that the second binding protein binds, or binds to a site that overlaps (e.g., 50%, 60%, 70%, 80%, 90%, or 100% overlap, e.g., in terms of amino acid sequence or other molecular feature (e.g., glycosyl group, phosphate group, or sulfate group)) with the site that the second binding protein binds.

[0594] A first binding protein (e.g., antibody) “competes for binding” with a second binding protein (e.g., antibody) if the binding of the first binding protein to its epitope decreases (e.g., by 10%, 20%, 30%, 40%, 50%, 60%, 70%, 80%, 90%, 100%, or more) the amount of the second binding protein that binds to its epitope. The competition can be direct (e.g., the first binding protein binds to an epitope that is the same as, or overlaps with, the epitope bound by the second binding protein), or indirect (e.g., the binding of the first binding protein to its epitope causes a steric change in the target compound that decreases the ability of the second binding protein to bind to its epitope).

[0595] Calculations of “homology” or “sequence identity” between two sequences (the terms are used interchangeably herein) are performed as follows. The sequences are aligned for optimal comparison purposes (e.g., gaps can be introduced in one or both of a first and a second amino acid or nucleic acid sequence for optimal alignment and non-homologous sequences can be disregarded for comparison purposes). The optimal alignment is determined as the best score using the GAP program in the GCG software package with a Blossum 62 scoring matrix with a gap penalty of 12, a gap extend penalty of 4, and a frameshift gap penalty of 5. The amino acid residues or nucleotides at corresponding amino acid positions or nucleotide positions are then compared. When a position in the first sequence is occupied by the same amino acid residue or nucleotide as the corresponding position in the second sequence, then the molecules are identical at that position (as used herein amino acid or nucleic acid “identity” is equivalent to amino acid or nucleic acid “homology”). The percent identity between the two sequences is a function of the number of identical positions shared by the sequences.

[0596] In a preferred embodiment, the length of a reference sequence aligned for comparison purposes is at least 30%, preferably at least 40%, more preferably at least 50%, even more preferably at least 60%, and even more preferably at least 70%, 80%, 90%, 92%, 95%, 97%, 98%, or 100% of the length of the reference sequence. For example, the reference sequence may be the length of the immunoglobulin variable domain sequence.

[0597] A “humanized” immunoglobulin variable region is an immunoglobulin variable region that is modified to include a sufficient number of human framework amino acid positions such that the immunoglobulin variable region does not elicit an immunogenic response in a normal human. Descriptions of “humanized” immunoglobulins include, for example, U.S. Pat. Nos. 6,407,213 and 5,693,762.

[0598] As used herein, the term “hybridizes under low stringency, medium stringency, high stringency, or very high stringency conditions” describes conditions for hybridization and washing. Guidance for performing hybridization reactions can be found in Current Protocols in Molecular Biology, John Wiley & Sons, N.Y. (1989), 6.3.1-6.3.6. Aqueous and nonaqueous methods are described in that reference and either can be used. Specific hybridization conditions referred to herein are as follows: (1) low stringency hybridization conditions in 6× sodium chloride/sodium citrate (SSC) at about 45° C., followed by two washes in 0.2×SSC, 0.1% SDS at least at 50° C. (the temperature of the washes can be increased to 55° C. for low stringency conditions); (2) medium stringency hybridization conditions in 6×SSC at about 45° C., followed by one or more washes in 0.2×SSC, 0.1% SDS at 60° C.; (3) high stringency hybridization conditions in 6×SSC at about 45° C., followed by one or more washes in 0.2×SSC, 0.1% SDS at 65° C.; and (4) very high stringency hybridization conditions are 0.5M sodium phosphate, 7% SDS at 65° C., followed by one or more washes at 0.2×SSC, 1% SDS at 65° C. Very high stringency conditions (4) are the preferred conditions and the ones that should be used unless otherwise specified. The disclosure includes nucleic acids that hybridize with low, medium, high, or very high stringency to a nucleic acid described herein or to a complement thereof, e.g., nucleic acids encoding a binding protein described herein. The nucleic acids can be the same length or within 30, 20, or 10% of the length of the reference nucleic acid. The nucleic acid can correspond to a region encoding an immunoglobulin variable domain sequence described herein.

[0599] An “isolated composition” refers to a composition that is removed from at least 90% of at least one component of a natural sample from which the isolated composition can be obtained. Compositions produced artificially or naturally can be “compositions of at least” a certain degree of purity if the species or population of species of interest is at least 5, 10, 25, 50, 75, 80, 90, 92, 95, 98, or 99% pure on a weight-weight basis.

[0600] An “isolated” protein refers to a protein that is removed from at least 90% of at least one component of a natural sample from which the isolated protein can be obtained. Proteins can be “of at least” a certain degree of purity if the species or population of species of interest is at least 5, 10, 25, 50, 75, 80, 90, 92, 95, 98, or 99% pure on a weight-weight basis.

[0601] The term “modulator” refers to a polypeptide, nucleic acid, macromolecule, complex, molecule, small molecule, compound, species or the like (naturally-occurring or non-naturally-occurring), or an extract made from biological materials such as bacteria, plants, fungi, or animal cells or tissues, that may be capable of causing modulation. Modulators may be evaluated for potential activity as inhibitors or activators (directly or indirectly) of a functional property, biological activity or process, or combination of them, (e.g., agonist, partial antagonist, partial agonist, inverse agonist, antagonist, anti-microbial agents, inhibitors of microbial infection or proliferation, and the like) by inclusion in assays. In such assays, many modulators may be screened at one time. The activity of a modulator may be known, unknown or partially known.

[0602] A “non-essential” amino acid residue is a residue that can be altered from the wild-type sequence of the binding agent, e.g., the antibody, without abolishing or more preferably, without substantially altering a biological activity, whereas changing an “essential” amino acid residue results in a substantial loss of activity.

[0603] A “patient,” “subject” or “host” (these terms are used interchangeably) to be treated by the subject method may mean either a human or non-human animal.

[0604] The terms “prekallikrein” and “preplasma kallikrein” are used interchangeably herein and refer to the zymogen form of active plasma kallikrein, which is also known as prekallikrein.

[0605] The term “preventing” or to “prevent” a disease in a subject refers to subjecting the subject to a pharmaceutical treatment, e.g., the administration of a drug, such that at least one symptom of the disease is prevented, that is, administered prior to clinical manifestation of the unwanted condition (e.g., disease or other unwanted state of the host animal) so that it protects the host against developing the unwanted condition. “Preventing” a disease may also be referred to as “prophylaxis” or “prophylactic treatment.”

[0606] As used herein, the term “substantially identical” (or “substantially homologous”) is used herein to refer to a first amino acid or nucleic acid sequence that contains a sufficient number of identical or equivalent (e.g., with a similar side chain, e.g., conserved amino acid substitutions) amino acid residues or nucleotides to a second amino acid or nucleic acid sequence such that the first and second amino acid or nucleic acid sequences have (or encode proteins having) similar activities, e.g., a binding activity, a binding preference, or a biological activity. In the case of antibodies, the second antibody has the same specificity and has at least 50%, at least 25%, or at least 10% of the affinity relative to the same antigen.

[0607] Sequences similar or homologous (e.g., at least about 85% sequence identity) to the sequences disclosed herein are also part of this application. In some embodiments, the sequence identity can be about 85%, 90%, 91%, 92%, 93%, 94%, 95%, 96%, 97%, 98%, 99% or higher. In some embodiments, a plasma kallikrein binding protein can have about 85%, 90%, 91%, 92%, 93%, 94%, 95%, 96%, 97%, 98%, 99% or higher sequence identity to a binding protein described herein. In some embodiments, a plasma kallikrein binding protein can have about 85%, 90%, 91%, 92%, 93%, 94%, 95%, 96%, 97%, 98%, 99% or higher sequence identity in the HC and/or LC framework regions (e.g., HC and/or LC FR 1, 2, 3, and/or 4) to a binding protein described herein. In some embodiments, a plasma kallikrein binding protein can have about 85%, 90%, 91%, 92%, 93%, 94%, 95%, 96%, 97%, 98%, 99% or higher sequence identity in the HC and/or LC CDRs (e.g., HC and/or LC CDR1, 2, and/or 3) to a binding protein described herein. In some embodiments, a plasma kallikrein binding protein can have about 85%, 90%, 91%, 92%, 93%, 94%, 95%, 96%, 97%, 98%, 99% or higher sequence identity in the constant region (e.g., CH1, CH2, CH3, and/or CL1) to a binding protein described herein.

[0608] In addition, substantial identity exists when the nucleic acid segments hybridize under selective hybridization conditions (e.g., highly stringent hybridization conditions), to the complement of the strand. The nucleic acids may be present in whole cells, in a cell lysate, or in a partially purified or substantially pure form.

[0609] Statistical significance can be determined by any art known method. Exemplary statistical tests include: the Students T-test, Mann Whitney U non-parametric test, and Wilcoxon non-parametric statistical test. Some statistically significant relationships have a P value of less than 0.05 or 0.02. Particular binding proteins may show a difference, e.g., in specificity or binding that are statistically significant (e.g., P value <0.05 or 0.02).

[0610] The terms “induce”, “inhibit”, “potentiate”, “elevate”, “increase”, “decrease” or the like, e.g., which denote distinguishable qualitative or quantitative differences between two states, may refer to a difference, e.g., a statistically significant difference, between the two states.

[0611] A “therapeutically effective dosage” preferably modulates a measurable parameter, e.g., plasma kallikrein activity, by a statistically significant degree or at least about 20%, more preferably by at least about 40%, even more preferably by at least about 60%, and still more preferably by at least about 80% relative to untreated subjects. The ability of a compound to modulate a measurable parameter, e.g., a disease-associated parameter, can be evaluated in an animal model system predictive of efficacy in human disorders and conditions, e.g., rheumatoid arthritis or oral mucositis. Alternatively, this property of a composition can be evaluated by examining the ability of the compound to modulate a parameter in vitro.

[0612] “Treating” a disease (or condition) in a subject or “treating” a subject having a disease refers to subjecting the subject to a pharmaceutical treatment, e.g., the administration of a drug, such that at least one symptom of the disease is cured, alleviated or decreased.

[0613] The term “preventing” a disease in a subject refers to subjecting the subject to a pharmaceutical treatment, e.g., the administration of a drug, such that at least one symptom of the disease is prevented, that is, administered prior to clinical manifestation of the unwanted condition (e.g., disease or other unwanted state of the host animal) so that it protects the host against developing the unwanted condition. “Preventing” a disease may also be referred to as “prophylaxis” or “prophylactic treatment.”

[0614] A “prophylactically effective amount” refers to an amount effective, at dosages and for periods of time necessary, to achieve the desired prophylactic result. Typically, because a prophylactic dose is used in subjects prior to or at an earlier stage of disease, the prophylactically effective amount will be less than the therapeutically effective amount.

[0615] As used herein the term “DX-2922” as used interchangeably with the term “X101-A01”. Other variants of this antibody are described below.

| Antibody | |
|---|---|
| Identification | Description |
| X63-G06 | Non-germlined Fab discovered using ROLIC, |
| | same HC but different LC as M160-G12 |
| X81-B01 | Germlined IgG produced in HEK 293T cells |
| X101-A01 | Germlined IgG produced in CHO cells, same |
| | HC and LC sequence as X81-B01 |
| DX-2922 | Alternate nomenclature for X101-A01 |

[0616] As used herein the term “DX-2930” as used interchangeably with the term “X124-G01”. Other variants of this antibody are described below.

| Antibody | |
|---|---|
| Identification | Description |
| M162-A04 | Non-germlined Fab discovered using phage display |
| M199-A08 | Heavy chain CDR3 varied Fab derived by affinity |
| | maturation of M162-A04 |
| X115-F02 | Germlined Fab produced in 293T cells, same variable |
| | heavy chain as X124-G01 |
| X124-G01 or | Germlined IgG produced in CHO cells, same variable |
| DX-2930 | heavy chain as X115-F02, same variable LC as |
| | X115-F02 except C-terminal Lys is removed |

[0617] As used herein the term “unstructured recombinant polymer” (URP) refers to an amino acid sequence that lacks a secondary structure and shares commonality with denatured peptide sequences, e.g., exhibiting a typical behavior like denatured peptide sequences, under physiological conditions. URP sequences lack a defined tertiary structure and they have limited or no secondary structure as detected by, e.g., Chou-Fasman algorithm.

### Plasma Kallikrein Binding Proteins

[0618] Plasma kallikrein binding proteins can be full-length (e.g., an IgG (e.g., an IgG1, IgG2, IgG3, IgG4), IgM, IgA (e.g., IgA1, IgA2), IgD, and IgE) or can include only an antigen-binding fragment (e.g., a Fab, F(ab′)2 or scFv fragment. The binding protein can include two heavy chain immunoglobulins and two light chain immunoglobulins, or can be a single chain antibody. Plasma kallikrein binding proteins can be recombinant proteins such as humanized, CDR grafted, chimeric, deimmunized, or in vitro generated antibodies, and may optionally include constant regions derived from human germline immunoglobulin sequences. In one embodiment, the plasma kallikrein binding protein is a monoclonal antibody.

[0619] In one aspect, the disclosure features a protein (e.g., an isolated protein) that binds to plasma kallikrein (e.g., human plasma kallikrein and/or murine kallikrein) and includes at least one immunoglobulin variable region. For example, the protein includes a heavy chain (HC) immunoglobulin variable domain sequence and/or a light chain (LC) immunoglobulin variable domain sequence. In one embodiment, the protein binds to and inhibits plasma kallikrein, e.g., human plasma kallikrein and/or murine kallikrein.

[0620] The protein can include one or more of the following characteristics: (a) a human CDR or human framework region; (b) the HC immunoglobulin variable domain sequence comprises one or more (e.g., 1, 2, or 3) CDRs that are at least 85, 88, 89, 90, 91, 92, 93, 94, 95, 96, 97, 98, 99, or 100% identical to a CDR of a HC variable domain described herein; (c) the LC immunoglobulin variable domain sequence comprises one or more (e.g., 1, 2, or 3) CDRs that are at least 85, 88, 89, 90, 91, 92, 93, 94, 95, 96, 97, 98, 99, or 100% identical to a CDR of a LC variable domain described herein; (d) the LC immunoglobulin variable domain sequence is at least 85, 88, 89, 90, 91, 92, 93, 94, 95, 96, 97, 98, 99, or 100% identical to a LC variable domain described herein (e.g., overall or in framework regions or CDRs); (e) the HC immunoglobulin variable domain sequence is at least 85, 88, 89, 90, 91, 92, 93, 94, 95, 96, 97, 98, 99, or 100% identical to a HC variable domain described herein (e.g., overall or in framework regions or CDRs); (f) the protein binds an epitope bound by a protein described herein, or competes for binding with a protein described herein; (g) a primate CDR or primate framework region; (h) the HC immunoglobulin variable domain sequence comprises a CDR1 that differs by at least one amino acid but by no more than 2 or 3 amino acids from the CDR1 of a HC variable domain described herein; (i) the HC immunoglobulin variable domain sequence comprises a CDR2 that differs by at least one amino acid but by no more than 2, 3, 4, 5, 6, 7, or 8 amino acids from the CDR2 of a HC variable domain described herein; (j) the HC immunoglobulin variable domain sequence comprises a CDR3 that differs by at least one amino acid but by no more than 2, 3, 4, 5, or 6 amino acids from the CDR3 of a HC variable domain described herein; (k) the LC immunoglobulin variable domain sequence comprises a CDR1 that differs by at least one amino acid but by no more than 2, 3, 4, or 5 amino acids from the CDR1 of a LC variable domain described herein; (l) the LC immunoglobulin variable domain sequence comprises a CDR2 that differs by at least one amino acid but by no more than 2, 3, or 4 amino acids from the CDR2 of a LC variable domain described herein; (m) the LC immunoglobulin variable domain sequence comprises a CDR3 that differs by at least one amino acid but by no more than 2, 3, 4, or 5 amino acids from the CDR3 of a LC variable domain described herein; (n) the LC immunoglobulin variable domain sequence differs by at least one amino acid but by no more than 2, 3, 4, 5, 6, 7, 8, 9, or 10 amino acids from a LC variable domain described herein (e.g., overall or in framework regions or CDRs); and (o) the HC immunoglobulin variable domain sequence differs by at least one amino acid but by no more than 2, 3, 4, 5, 6, 7, 8, 9, or 10 amino acids from a HC variable domain described herein (e.g., overall or in framework regions or CDRs).

[0621] The plasma kallikrein binding protein may be an isolated protein (e.g., at least 70, 80, 90, 95, or 99% free of other proteins). In some embodiments, the plasma kallikrein binding protein, or composition thereof, is isolated from antibody cleavage fragments (e.g., cleaved DX-2922) that are inactive or partially active (e.g., bind plasma kallikrein with a Ki, app of 5000 nM or greater) compared to the plasma kallikrein binding protein.

[0622] For example, the plasma kallikrein binding protein is at least 70% free of such antibody cleavage fragments; in other embodiments the binding protein is at least 80%, at least 90%, at least 95%, at least 99% or even 100% free from antibody cleavage fragments that are inactive or partially active.

[0623] The plasma kallikrein binding protein may additionally inhibit plasma kallikrein, e.g., human plasma kallikrein.

[0624] In some embodiments, the plasma kallikrein binding protein does not bind prekallikrein (e.g., human prekallikrein and/or murine prekallikrein), but binds to the active form of plasma kallikrein (e.g., human plasma kallikrein and/or murine kallikrein).

[0625] In certain embodiments, the protein binds at or near the active site of the catalytic domain of plasma kallikrein, or a fragment thereof, or binds an epitope that overlaps with the active site of plasma kallikrein.

[0626] In some aspects, the protein binds the same epitope or competes for binding with a protein described herein.

[0627] In some embodiments, the protein competes with or binds the same epitope as M162-A04, M160-G12, M142-H08, X63-G06, X101-A01, X81-B01, X67-D03, X67-G04, X115-B07, X115-D05, X115-E09, X115-H06, X115-A03, X115-D01, X115-F02, X115-G04, M29-D09, M145-D11, M06-D09 and M35-G04.

[0628] In some embodiments, the protein binds to (e.g., positions on plasma kallikrein corresponding to) CLIPS peptide C1, C2, C3, C4, C5, C6, or C7, or more than one of these peptides, e.g., the protein binds to C5 and C6. CLIPS peptides C1-C7 are peptides in plasma kallikrein identified by CLIPS epitope mapping (see FIGS. 9 and 10A-10C). C1 corresponds to positions 55-67 of the catalytic domain, C2 to positions 81-94, C3 to positions 101-108, C4 to positions 137-151, C5 to positions 162-178, C6 to positions 186-197, and C7 to positions 214-217 of plasma kallikrein.

[0629] In some embodiments, the protein binds to an epitope shown in FIG. 9.

[0630] In some embodiments, the protein binds to one or more amino acids that form the catalytic triad of plasma kallikrein: His434, Asp483, and/or Ser578 (numbering based on the human sequence).

[0631] In some embodiments, the protein binds one or more amino acids of: Arg551, Gln553, Tyr555, Thr558, and/or Arg560 (numbering based on the human sequence). In some embodiments, the plasma kallikrein binding protein binds one or more amino acids of: S478, N481, S525, and K526 (numbering based on the human kallikrein sequence).

[0632] In some embodiments, the protein binds to one or more amino acids of Ser479, Tyr563, and/or Asp585 (numbering based on the human sequence).

[0633] The active site cleft of plasma kallikrein contains three amino acids that form the catalytic triad (His434, Asp483, and Ser578) and result in enzymatic hydrolysis of bound substrate (catalytic triad residues are underlined in FIG. 10). The peptides selected for the CLIPS epitope mapping analysis were determined to be surface accessible and either form or surround the vicinity of the active site. Peptide C1 contains the active site histidine 434. Peptide C3 contains the active site aspartate 483. Peptide C6 contains the active site serine 578. It is possible for an antibody to bind multiple surface exposed amino acids that are discontinuous in amino acid sequence. For example, by CLIPS analysis, X81-B01 appears to bind the C2, C3, C5 and the C6 peptides.

[0634] In some embodiments, the protein binds to an epitope that includes one or more amino acids from CLIPS peptide C1, peptide C2, peptide C3, peptide C4, peptide C5, peptide C6, or peptide C7.

[0635] In some embodiments, the protein binds to an epitope that includes amino acids from at least 2 different CLIPS peptides, e.g., from at least two of peptide C1, peptide C2, peptide C3, peptide C4, peptide C5, peptide C6, or peptide C7.

[0636] The protein can bind to plasma kallikrein, e.g., human plasma kallikrein, with a binding affinity of at least 10⁵, 10⁶, 10⁷, 10⁸, 10⁹, 10¹⁰ and 10¹¹ M⁻¹. In one embodiment, the protein binds to human plasma kallikrein with a K_{off} slower than 1×10⁻³, 5×10⁻⁴ s⁻¹, or 1×10⁻⁴ s⁻¹. In one embodiment, the protein binds to human plasma kallikrein with a Kₒₙ faster than 1×10², 1×10³, or 5×10³ M⁻¹ s⁻¹. In one embodiment, the protein binds to plasma kallikrein, but does not bind to tissue kallikrein and/or plasma prekallikrein (e.g., the protein binds to tissue kallikrein and/or plasma prekallikrein less effectively (e.g., 5-, 10-, 50-, 100-, or 1000-fold less or not at all, e.g., as compared to a negative control) than it binds to plasma kallikrein.

[0637] In one embodiment, the protein inhibits human plasma kallikrein activity, e.g., with a Ki of less than 10⁻⁵, 10⁻⁶, 10⁻⁷, 10⁻⁸, 10⁻⁹, and 10⁻¹⁰ M. The protein can have, for example, an IC₅₀ of less than 100 nM, 10 nM, 1, 0.5, or 0.2 nM. For example, the protein may modulate plasma kallikrein activity, as well as the production of Factor XIIa (e.g., from Factor XII) and/or bradykinin (e.g., from high-molecular-weight kininogen (HMWK)). The protein may inhibit plasma kallikrein activity, and/or the production of Factor XIIa (e.g., from Factor XII) and/or bradykinin (e.g., from high-molecular-weight kininogen (HMWK)). The affinity of the protein for human plasma kallikrein can be characterized by a K_{D} of less than 100 nm, less than 10 nM, less than 5 nM, less than 1 nM, less than 0.5 nM. In one embodiment, the protein inhibits plasma kallikrein, but does not inhibit tissue kallikrein (e.g., the protein inhibits tissue kallikrein less effectively (e.g., 5-, 10-, 50-, 100-, or 1000-fold less or not at all, e.g., as compared to a negative control) than it inhibits plasma kallikrein.

[0638] In some embodiments, the protein has an apparent inhibition constant (K_{i,app}) of less than 1000, 500, 100, 5, 1, 0.5 or 0.2 nM.

[0639] Plasma kallikrein binding proteins may be antibodies. Plasma kallikrein binding antibodies may have their HC and LC variable domain sequences included in a single polypeptide (e.g., scFv), or on different polypeptides (e.g., IgG or Fab).

[0640] In a preferred embodiment, the protein is an antibody (e.g., a human antibody) having the light and heavy chains of antibodies selected from the group consisting of M162-A04, M199-A08, M160-G12, M142-H08 X63-G06, X101-A01, X81-B01, X67-D03, X67-G04, DX-2922, X115-B07, X115-D05, X115-E09, X115-H06, X115-A03, X115-D01, X115-F02, X124-G01, X115-G04, M29-D09, M145-D11, M06-D09 and M35-G04.

[0641] In a preferred embodiment, the protein is an antibody (e.g., a human antibody) having the heavy chain of an antibody selected from the group consisting of: M162-A04, M199-A08, M160-G12, M142-H08, X63-G06, X101-A01, X81-B01, X67-D03, X67-G04, X115-B07, X115-D05, X115-E09, X115-H06, X115-A03, X115-D01, X115-F02, X124-G01, X115-G04, M29-D09, M145-D11, M06-D09 and M35-G04.

[0642] In a preferred embodiment, the protein is an antibody (e.g., a human antibody) having the light chain of an antibody selected from the group consisting of: M162-A04, M199-A08, M160-G12, M142-H08 X63-G06, X101-A01, X81-B01, X67-D03, X67-G04, X115-B07, X115-D05, X115-E09, X115-H06, X115-A03, X115-D01, X115-F02, X124-G01, X115-G04, M29-D09, M145-D11, M06-D09 and M35-G04.

[0643] In a preferred embodiment, the protein is an antibody (e.g., a human antibody) having light and heavy antibody variable regions of an antibody selected from the group consisting of M162-A04, M199-A08, M160-G12, M142-H08, X63-G06, X101-A01, X81-B01, X67-D03, X67-G04, X115-B07, X115-D05, X115-E09, X115-H06, X115-A03, X115-D01, X115-F02, X124-G01, X115-G04, M29-D09, M145-D11, M06-D09 and M35-G04.

[0644] In a preferred embodiment, the protein is an antibody (e.g., a human antibody) having a heavy chain antibody variable region of an antibody selected from the group consisting of: M162-A04, M199-A08, M160-G12, M142-H08, X63-G06, X101-A01, X81-B01, X67-D03, X67-G04, X115-B07, X115-D05, X115-E09, X115-H06, X115-A03, X115-D01, X115-F02, X124-G01, X115-G04, M29-D09, M145-D11, M06-D09 and M35-G04.

[0645] In a preferred embodiment, the protein is an antibody (e.g., a human antibody) having a light chain antibody variable region of an antibody selected from the group consisting of: M162-A04, M199-A08, M160-G12, M142-H08, X63-G06, X101-A01, X81-B01, X67-D03, X67-G04, X115-B07, X115-D05, X115-E09, X115-H06, X115-A03, X115-D01, X115-F02, X124-G01, X115-G04, M29-D09, M145-D11, M06-D09 and M35-G04.

[0646] In a preferred embodiment, the protein is an antibody (e.g., a human antibody) having one or more (e.g., 1, 2, or 3) heavy chain CDRs selected from the corresponding CDRs of the group of heavy chains consisting of M162-A04, M199-A08, M160-G12, M142-H08, X63-G06, X101-A01, X81-B01, X67-D03, X67-G04, X115-B07, X115-D05, X115-E09, X115-H06, X115-A03, X115-D01, X115-F02, X124-G01, X115-G04, M29-D09, M145-D11, M06-D09 and M35-G04.

[0647] In a preferred embodiment, the protein is an antibody (e.g., a human antibody) having one or more (e.g., 1, 2, or 3) light chain CDRs selected from the corresponding CDRs of the group of light chains consisting of M162-A04, M199-A08, M160-G12, M142-H08, X63-G06, X101-A01, X81-B01, X67-D03, X67-G04, X115-B07, X115-D05, X115-E09, X115-H06, X115-A03, X115-D01, X115-F02, X124-G01, X115-G04, M29-D09, M145-D11, M06-D09 and M35-G04.

[0648] In a preferred embodiment, the protein is an antibody (e.g., a human antibody) having one or more (e.g., 1, 2, or 3) heavy chain CDRs and one or more (e.g., 1, 2, or 3) light chain CDRs selected from the corresponding CDRs of the group of light chains consisting of M162-A04, M199-A08, M160-G12, M142-H08, X63-G06, X101-A01, X81-B01, X67-D03, X67-G04, X115-B07, X115-D05, X115-E09, X115-H06, X115-A03, X115-D01, X115-F02, X124-G01, X115-G04, M29-D09, M145-D11, M06-D09 and M35-G04.

[0649] In one embodiment, the HC and LC variable domain sequences are components of the same polypeptide chain. In another, the HC and LC variable domain sequences are components of different polypeptide chains. For example, the protein is an IgG, e.g., IgG1, IgG2, IgG3, or IgG4. The protein can be a soluble Fab. In other implementations the protein includes a Fab2′, scFv, minibody, scFv::Fc fusion, Fab::HSA fusion, HSA::Fab fusion, Fab::HSA::Fab fusion, or other molecule that comprises the antigen combining site of one of the binding proteins herein. The VH and VL regions of these Fabs can be provided as IgG, Fab, Fab2, Fab2′, scFv, PEGylated Fab, PEGylated scFv, PEGylated Fab2, VH::CH1::HSA+LC, HSA::VH::CH1+LC, LC::HSA+VH::CH1, HSA::LC+VH::CH1, or other appropriate construction.

[0650] In one embodiment, the protein is a human or humanized antibody or is non-immunogenic in a human. For example, the protein includes one or more human antibody framework regions, e.g., all human framework regions, or framework regions at least 85, 88, 89, 90, 91, 92, 93, 94, 95, 96, 97, 98, 99% identical to human framework regions. In one embodiment, the protein includes a human Fc domain, or an Fc domain that is at least 95, 96, 97, 98, or 99% identical to a human Fc domain.

[0651] In one embodiment, the protein is a primate or primatized antibody or is non-immunogenic in a human. For example, the protein includes one or more primate antibody framework regions, e.g., all primate framework regions, or framework regions at least 85, 88, 89, 90, 91, 92, 93, 94, 95, 96, 97, 98, 99% identical to primate framework regions. In one embodiment, the protein includes a primate Fc domain, or an Fc domain that is at least 95, 96, 97, 98, or 99% identical to a primate Fc domain. “Primate” includes humans (Homo sapiens), chimpanzees (Pan troglodytes and Pan paniscus (bonobos)), gorillas (Gorilla gorilla), gibons, monkeys, lemurs, aye-ayes (Daubentonia madagascariensis), and tarsiers.

[0652] In some embodiments, the affinity of the primate antibody for human plasma kallikrein is characterized by a K_{D} of less than 1000, 500, 100, 10, 5, 1, 0.5 nM, e.g., less than 10 nM, less than 1 nM, or less than 0.5 nM.

[0653] In certain embodiments, the protein includes no sequences from mice or rabbits (e.g., is not a murine or rabbit antibody).

[0654] In some aspects, the disclosure provides the use of proteins (e.g., binding proteins, e.g., antibodies) (e.g., the proteins described herein) that bind to plasma kallikrein (e.g., human plasma kallikrein) and include at least one immunoglobin variable region in methods for treating (or preventing) a plasma kallikrein associated disorder or condition. For example, the plasma kallikrein binding protein includes a heavy chain (HC) immunoglobulin variable domain sequence and a light chain (LC) immunoglobulin variable domain sequence. A number of exemplary plasma kallikrein binding proteins are described herein.

[0655] The plasma kallikrein binding protein may be an isolated protein (e.g., at least 70, 80, 90, 95, or 99% free of other proteins).

[0656] The plasma kallikrein binding protein may additionally inhibit plasma kallikrein, e.g., human plasma kallikrein and/or murine plasma kallikrein. In some embodiments, it may be preferred to have an plasma kallikrein binding protein bind to both human and murine plasma kallikrein, as these antibodies can be tested for efficacy in a mouse model.

### Plasma Kallikrein

[0657] Exemplary plasma kallikrein sequences against which plasma kallikrein binding proteins may be developed can include human, mouse, or rat plasma kallikrein amino acid sequences, a sequence that is 80%, 85%, 90%, 95%, 96%, 97%, 98%, or 99% identical to one of these sequences, or a fragment thereof, e.g., of a sequence provided below.

[0658] The sequence of human plasma kallikrein that was used in selections and subsequent screening is shown below (accession number NP_000883.2). The human plasma kallikrein (86 kDa) that was used was purified from human plasma and activated with factor XIIa by a commercial vendor. Factor XIIa activates prekallikrein by cleaving the polypeptide sequence at a single site (between Arg371-Ile372, cleavage site marked by “/” in the sequence below) to generate active plasma kallikrein, which then consists of two disulfide linked polypeptides; a heavy chain of approximately 52 kDa and a catalytic domain of approximately 34 kDa [Colman and Schmaier, (1997) “Contact System: A Vascular Biology Modulator With Anticoagulant, Profibrinolytic, Antiadhesive, and Proinflammatory Attributes” Blood, 90, 3819-3843]

GCLTQLYENAFFRGGDVASMYTPNAQYCQMRCTFHPRCLLFSFLPASSI
NDMEKRFGCFLKDSVTGTLPKVHRTGAVSGHSLKQCGHQISACHRDIYK
GVDMRGVNFNVSKVSSVEECQKRCTSNIRCQFFSYATQTFHKAEYRNNC
LLKYSPGGTPTAIKVLSNVESGFSLKPCALSEIGCHMNIFQHLAFSDVD
VARVLTPDAFVCRTICTYHPNCLFFTFYTNVWKIESQRNVCLLKTSESG
TPSSSTPQENTISGYSLLTCKRTLPEPCHSKIYPGVDFGGEELNVTFVK
GVNVCQETCTKMIRCQFFTYSLLPEDCKEEKCKCFLRLSMDGSPTRIAY
GTQGSSGYSLRLCNTGDNSVCTTKTSTR/IVGGTNSSWGEWPWQVSLQV
KLTAQRHLCGGSLIGHQWVLTAAHCFDGLPLQDVWRIYSGILNLSDITK
DTPFSQIKEIIIHQNYKVSEGNHDIALIKLQAPLNYTEFQKPICLPSKG
DTSTIYTNCWVTGWGFSKEKGEIQNILQKVNIPLVTNEECQKRYQDYKI
TQRMVCAGYKEGGKDACKGDSGGPLVCKHNGMWRLVGITSWGEGCARRE
QPGVYTKVAEYMDWILEKTQSSDGKAQMQSPA

[0659] The human, mouse, and rat prekallikrein amino acid sequences, and the mRNA sequences encoding the same, are illustrated below. The sequences of prekallikrein are the same as plasma kallikrein, except that active plasma kallikrein (pkal) has the single polypeptide chain cleaved at a single position (indicated by the “/”) to generate two chains. The sequences provided below are full sequences that include signal sequences. On secretion from the expressing cell, it is expected that the signal sequences are removed.

Human plasma kallikrein (ACCESSION: NP_000883.2)
>gi|78191798|ref|NP_000883.2| plasma kallikrein B1 precursor [Homo sapiens]
MILFKQATYFISLFATVSCGCLTQLYENAFFRGGDVASMYTPNAQYCQMRCTFHPRCLLFSFLPASSIND
MEKRFGCFLKDSVTGTLPKVHRTGAVSGHSLKQCGHQISACHRDIYKGVDMRGVNFNVSKVSSVEECQKR
CTSNIRCQFFSYATQTFHKAEYRNNCLLKYSPGGTPTAIKVLSNVESGFSLKPCALSEIGCHMNIFQHLA
FSDVDVARVLTPDAFVCRTICTYHPNCLFFTFYTNVWKIESQRNVCLLKTSESGTPSSSTPQENTISGYS
LLTCKRTLPEPCHSKIYPGVDFGGEELNVTFVKGVNVCQETCTKMIRCQFFTYSLLPEDCKEEKCKCFLR
LSMDGSPTRIAYGTQGSSGYSLRLCNTGDNSVCTTKTSTRIVGGTNSSWGEWPWQVSLQVKLTAQRHLCG
GSLIGHQWVLTAAHCFDGLPLQDVWRIYSGILNLSDITKDTPFSQIKEIIIHQNYKVSEGNHDIALIKLQ
APLNYTEFQKPICLPSKGDTSTIYTNCWVTGWGFSKEKGEIQNILQKVNIPLVTNEECQKRYQDYKITQR
MVCAGYKEGGKDACKGDSGGPLVCKHNGMWRLVGITSWGEGCARREQPGVYTKVAEYMDWILEKTQSSDG
KAQMQSPA
Human plasma kallikrein mRNA (ACCESSION: NM_000892)
>gi|78191797|ref|NM_000892.3| Homo sapiens kallikrein B, plasma (Fletcher
factor) 1 (KLKB1), mRNA
AGAACAGCTTGAAGACCGTTCATTTTTAAGTGACAAGAGACTCACCTCCAAGAAGCAATTGTGTTTTCAG
AATGATTTTATTCAAGCAAGCAACTTATTTCATTTCCTTGTTTGCTACAGTTTCCTGTGGATGTCTGACT
CAACTCTATGAAAACGCCTTCTTCAGAGGTGGGGATGTAGCTTCCATGTACACCCCAAATGCCCAATACT
GCCAGATGAGGTGCACATTCCACCCAAGGTGTTTGCTATTCAGTTTTCTTCCAGCAAGTTCAATCAATGA
CATGGAGAAAAGGTTTGGTTGCTTCTTGAAAGATAGTGTTACAGGAACCCTGCCAAAAGTACATCGAACA
GGTGCAGTTTCTGGACATTCCTTGAAGCAATGTGGTCATCAAATAAGTGCTTGCCATCGAGACATTTATA
AAGGAGTTGATATGAGAGGAGTCAATTTTAATGTGTCTAAGGTTAGCAGTGTTGAAGAATGCCAAAAAAG
GTGCACCAGTAACATTCGCTGCCAGTTTTTTTCATATGCCACGCAAACATTTCACAAGGCAGAGTACCGG
AACAATTGCCTATTAAAGTACAGTCCCGGAGGAACACCTACCGCTATAAAGGTGCTGAGTAACGTGGAAT
CTGGATTCTCACTGAAGCCCTGTGCCCTTTCAGAAATTGGTTGCCACATGAACATCTTCCAGCATCTTGC
GTTCTCAGATGTGGATGTTGCCAGGGTTCTCACTCCAGATGCTTTTGTGTGTCGGACCATCTGCACCTAT
CACCCCAACTGCCTCTTCTTTACATTCTATACAAATGTATGGAAAATCGAGTCACAAAGAAATGTTTGTC
TTCTTAAAACATCTGAAAGTGGCACACCAAGTTCCTCTACTCCTCAAGAAAACACCATATCTGGATATAG
CCTTTTAACCTGCAAAAGAACTTTACCTGAACCCTGCCATTCTAAAATTTACCCGGGAGTTGACTTTGGA
GGAGAAGAATTGAATGTGACTTTTGTTAAAGGAGTGAATGTTTGCCAAGAGACTTGCACAAAGATGATTC
GCTGTCAGTTTTTCACTTATTCTTTACTCCCAGAAGACTGTAAGGAAGAGAAGTGTAAGTGTTTCTTAAG
ATTATCTATGGATGGTTCTCCAACTAGGATTGCGTATGGGACACAAGGGAGCTCTGGTTACTCTTTGAGA
TTGTGTAACACTGGGGACAACTCTGTGTGCACAACAAAAACAAGCACACGCATTGTTGGAGGAACAAACT
CTTCTTGGGGAGAGTGGCCCTGGCAGGTGAGCCTGCAGGTGAAGCTGACAGCTCAGAGGCACCTGTGTGG
AGGGTCACTCATAGGACACCAGTGGGTCCTCACTGCTGCCCACTGCTTTGATGGGCTTCCCCTGCAGGAT
GTTTGGCGCATCTATAGTGGCATTTTAAATCTGTCAGACATTACAAAAGATACACCTTTCTCACAAATAA
AAGAGATTATTATTCACCAAAACTATAAAGTCTCAGAAGGGAATCATGATATCGCCTTGATAAAACTCCA
GGCTCCTTTGAATTACACTGAATTCCAAAAACCAATATGCCTACCTTCCAAAGGTGACACAAGCACAATT
TATACCAACTGTTGGGTAACCGGATGGGGCTTCTCGAAGGAGAAAGGTGAAATCCAAAATATTCTACAAA
AGGTAAATATTCCTTTGGTAACAAATGAAGAATGCCAGAAAAGATATCAAGATTATAAAATAACCCAACG
GATGGTCTGTGCTGGCTATAAAGAAGGGGGAAAAGATGCTTGTAAGGGAGATTCAGGTGGTCCCTTAGTT
TGCAAACACAATGGAATGTGGCGTTTGGTGGGCATCACCAGCTGGGGTGAAGGCTGTGCCCGCAGGGAGC
AACCTGGTGTCTACACCAAAGTCGCTGAGTACATGGACTGGATTTTAGAGAAAACACAGAGCAGTGATGG
AAAAGCTCAGATGCAGTCACCAGCATGAGAAGCAGTCCAGAGTCTAGGCAATTTTTACAACCTGAGTTCA
AGTCAAATTCTGAGCCTGGGGGGTCCTCATCTGCAAAGCATGGAGAGTGGCATCTTCTTTGCATCCTAAG
GACGAAAAACACAGTGCACTCAGAGCTGCTGAGGACAATGTCTGGCTGAAGCCCGCTTTCAGCACGCCGT
AACCAGGGGCTGACAATGCGAGGTCGCAACTGAGATCTCCATGACTGTGTGTTGTGAAATAAAATGGTGA
AAGATCAAAAAA
Mouse plasma kallikrein (ACCESSION: NP_032481.1)
>gi|6680584|ref|NP_032481.1| kallikrein B, plasma 1 [Mus musculus]
MILFNRVGYFVSLFATVSCGCMTQLYKNTFFRGGDLAAIYTPDAQYCQKMCTFHPRCLLFSFLAVTPPKE
TNKRFGCFMKESITGTLPRIHRTGAISGHSLKQCGHQISACHRDIYKGLDMRGSNFNISKTDNIEECQKL
CTNNFHCQFFTYATSAFYRPEYRKKCLLKHSASGTPTSIKSADNLVSGFSLKSCALSEIGCPMDIFQHSA
FADLNVSQVITPDAFVCRTICTFHPNCLFFTFYTNEWETESQRNVCFLKTSKSGRPSPPIPQENAISGYS
LLTCRKTRPEPCHSKIYSGVDFEGEELNVTFVQGADVCQETCTKTIRCQFFIYSLLPQDCKEEGCKCSLR
LSTDGSPTRITYGMQGSSGYSLRLCKLVDSPDCTTKINARIVGGTNASLGEWPWQVSLQVKLVSQTHLCG
GSIIGRQWVLTAAHCFDGIPYPDVWRIYGGILSLSEITKETPSSRIKELIIHQEYKVSEGNYDIALIKLQ
TPLNYTEFQKPICLPSKADTNTIYTNCWVTGWGYTKEQGETQNILQKATIPLVPNEECQKKYRDYVINKQ
MICAGYKEGGTDACKGDSGGPLVCKHSGRWQLVGITSWGEGCGRKDQPGVYTKVSEYMDWILEKTQSSDV
RALETSSA
Mouse plasma kallikrein mRNA (ACCESSION: NM_008455.2)
>gi|236465804|ref|NM_008455.2| Mus musculus kallikrein B, plasma 1
(Kikb1), mRNA
AGACCGCCCTCGGTGCCATATTCAGAGGGCTTGAAGACCATCTTCATGTGAAGACTCCCTCTCCTCCAGA
ACCACAACGTGACCATCCTTCCAGGATGATTTTATTCAACCGAGTGGGTTATTTTGTTTCCTTGTTTGCT
ACCGTCTCCTGTGGGTGTATGACTCAACTGTATAAAAATACCTTCTTCAGAGGTGGGGATCTAGCTGCCA
TCTACACCCCAGATGCCCAGTACTGTCAGAAGATGTGCACTTTTCACCCCAGGTGCCTGCTGTTCAGCTT
TCTCGCCGTGACTCCACCCAAAGAGACAAATAAACGGTTTGGTTGCTTCATGAAAGAGAGCATTACAGGG
ACTTTGCCAAGAATACACCGGACAGGGGCCATTTCTGGTCATTCTTTAAAGCAGTGTGGCCATCAAATAA
GTGCTTGCCACCGAGACATATACAAAGGACTTGATATGAGAGGGTCCAACTTTAATATCTCTAAGACCGA
CAATATTGAAGAATGCCAGAAACTGTGCACAAATAATTTTCACTGCCAATTTTTCACATATGCTACAAGT
GCATTTTACAGACCAGAGTACCGGAAGAAGTGCCTGCTGAAGCACAGTGCAAGCGGAACACCCACCAGCA
TAAAGTCAGCGGACAACCTGGTGTCTGGATTCTCACTGAAGTCCTGTGCGCTTTCGGAGATAGGTTGCCC
CATGGATATTTTCCAGCACTCTGCCTTTGCAGACCTGAATGTAAGCCAGGTCATCACCCCCGATGCCTTT
GTGTGTCGCACCATCTGCACCTTCCATCCCAACTGCCTTTTCTTCACGTTCTACACGAATGAATGGGAGA
CAGAATCACAGAGAAATGTTTGTTTTCTTAAGACGTCTAAAAGTGGAAGACCAAGTCCCCCTATTCCTCA
AGAAAACGCTATATCTGGATATAGTCTCCTCACCTGCAGAAAAACTCGCCCTGAACCCTGCCATTCCAAA
ATTTACTCTGGAGTTGACTTTGAAGGGGAAGAACTGAATGTGACCTTCGTGCAAGGAGCAGATGTCTGCC
AAGAGACTTGTACAAAGACAATCCGCTGCCAGTTTTTTATTTACTCCTTACTCCCCCAAGACTGCAAGGA
GGAGGGGTGTAAATGTTCCTTAAGGTTATCCACAGATGGCTCCCCAACTAGGATCACCTATGGCATGCAG
GGGAGCTCCGGTTATTCTCTGAGATTGTGTAAACTTGTGGACAGCCCTGACTGTACAACAAAAATAAATG
CACGTATTGTGGGAGGAACAAACGCTTCTTTAGGGGAGTGGCCATGGCAGGTCAGCCTGCAAGTGAAGCT
GGTATCTCAGACCCATTTGTGTGGAGGGTCCATCATTGGTCGCCAATGGGTACTGACAGCTGCCCATTGC
TTTGATGGAATTCCCTATCCAGATGTGTGGCGTATATATGGCGGAATTCTTAGTCTGTCCGAGATTACGA
AAGAAACGCCTTCCTCGAGAATAAAGGAGCTTATTATTCATCAGGAATACAAAGTCTCAGAAGGCAATTA
TGATATTGCCTTAATAAAGCTTCAGACGCCCCTGAATTATACTGAATTCCAAAAACCAATATGCCTGCCT
TCCAAAGCTGACACAAATACAATTTATACCAACTGTTGGGTGACTGGATGGGGCTACACGAAGGAACAAG
GTGAAACGCAAAATATTCTACAAAAGGCTACTATTCCTTTGGTACCAAATGAAGAATGCCAGAAAAAATA
CAGAGATTATGTTATAAACAAGCAGATGATCTGTGCTGGCTACAAAGAAGGCGGAACAGACGCTTGTAAG
GGAGATTCCGGTGGCCCCTTAGTCTGTAAACACAGTGGACGGTGGCAGTTGGTGGGTATCACCAGCTGGG
GTGAAGGCTGCGCCCGCAAGGACCAACCAGGAGTCTACACCAAAGTTTCTGAGTACATGGACTGGATATT
GGAGAAGACACAGAGCAGTGATGTAAGAGCTCTGGAGACATCTTCAGCCTGAGGAGGCTGGGTACCAAGG
AGGAAGAACCCAGCTGGCTTTACCACCTGCCCTCAAGGCAAACTAGAGCTCCAGGATTCTCGGCTGTAAA
ATGTTGATAATGGTGTCTACCTCACATCCGTATCATTGGATTGAAAATTCAAGTGTAGATATAGTTGCTG
AAGACAGCGTTTTGCTCAAGTGTGTTTCCTGCCTTGAGTCACAGGAGCTCCAATGGGAGCATTACAAAGA
TCACCAAGCTTGTTAGGAAAGAGAATGATCAAAGGGTTTTATTAGGTAATGAAATGTCTAGATGTGATGC
AATTGAAAAAAAGACCCCAGATTCTAGCACAGTCCTTGGGACCATTCTCATGTAACTGTTGACTCTGGAC
CTCAGCAGATCTCAGAGTTACCTGTCCACTTCTGACATTTGTTTATTAGAGCCTGATGCTATTCTTTCAA
GT GGAGCAAAAAAAAAAAAAAA
Rat plasma kallikrein (ACCESSION: NP_036857.2)
>gi|162138905|ref|NP_036857.2| kallikrein B, plasma 1 [Rattus norvegicus]
MILFKQVGYFVSLFATVSCGCLSQLYANTFFRGGDLAAIYTPDAQHCQKMCTFHPRCLLFSFLAVSPTKE
TDKRFGCFMKESITGTLPRIHRTGAISGHSLKQCGHQLSACHQDIYEGLDMRGSNFNISKTDSIEECQKL
CTNNIHCQFFTYATKAFHRPEYRKSCLLKRSSSGTPTSIKPVDNLVSGFSLKSCALSEIGCPMDIFQHFA
FADLNVSHVVTPDAFVCRTVCTFHPNCLFFTFYTNEWETESQRNVCFLKTSKSGRPSPPIIQENAVSGYS
LFTCRKARPEPCHFKIYSGVAFEGEELNATFVQGADACQETCTKTIRCQFFTYSLLPQDCKAEGCKCSLR
LSTDGSPTRITYEAQGSSGYSLRLCKVVESSDCTTKINARIVGGTNSSLGEWPWQVSLQVKLVSQNHMCG
GSIIGRQWILTAAHCFDGIPYPDVWRIYGGILNLSEITNKTPFSSIKELIIHQKYKMSEGSYDIALIKLQ
TPLNYTEFQKPICLPSKADTNTIYTNCWVTGWGYTKERGETQNILQKATIPLVPNEECQKKYRDYVITKQ
MICAGYKEGGIDACKGDSGGPLVCKHSGRWQLVGITSWGEGCARKEQPGVYTKVAEYIDWILEKIQSSKE
RALETSPA
Rat plasma kallikrein mRNA (ACCESSION: NM_012725)
>gi|162138904|ref|NM_012725.2| Rattus norvegicus kallikrein B, plasma 1
(Kikb1), mRNA
TGAAGACTAGCTTCATGTGAAGACTCCTTCTCCTCCAGCAGCACAAAGCAACCATCCTTCCAGGATGATT
TTATTCAAACAAGTGGGTTATTTTGTTTCCTTGTTCGCTACAGTTTCCTGTGGGTGTCTGTCACAACTGT
ATGCAAATACCTTCTTCAGAGGTGGGGATCTGGCTGCCATCTACACCCCGGATGCCCAGCACTGTCAGAA
GATGTGCACGTTTCACCCCAGGTGCCTGCTCTTCAGCTTCCTTGCCGTGAGTCCAACCAAGGAGACAGAT
AAAAGGTTTGGGTGCTTCATGAAAGAGAGCATTACAGGGACTTTGCCAAGAATACACCGGACAGGGGCCA
TTTCTGGTCATTCTTTAAAACAGTGTGGCCATCAATTAAGTGCTTGCCACCAAGACATATACGAAGGACT
GGATATGAGAGGGTCCAACTTTAATATATCTAAGACCGACAGTATTGAAGAATGCCAGAAACTGTGCACA
AATAATATTCACTGCCAATTTTTCACATATGCTACAAAAGCATTTCACAGACCAGAGTACAGGAAGAGTT
GCCTGCTGAAGCGCAGTTCAAGTGGAACGCCCACCAGTATAAAGCCAGTGGACAACCTGGTGTCTGGATT
CTCACTGAAGTCCTGTGCTCTCTCAGAGATCGGTTGCCCCATGGATATTTTCCAGCACTTTGCCTTTGCA
GACCTGAATGTAAGCCATGTCGTCACCCCCGATGCCTTCGTGTGTCGCACCGTTTGCACCTTCCATCCCA
ACTGCCTCTTCTTCACATTCTACACGAATGAGTGGGAGACGGAATCACAGAGGAATGTTTGTTTTCTTAA
GACATCTAAAAGTGGAAGACCAAGTCCCCCTATTATTCAAGAAAATGCTGTATCTGGATACAGTCTCTTC
ACCTGCAGAAAAGCTCGCCCTGAACCCTGCCATTTCAAGATTTACTCTGGAGTTGCCTTCGAAGGGGAAG
AACTGAACGCGACCTTCGTGCAGGGAGCAGATGCGTGCCAAGAGACTTGTACAAAGACCATCCGCTGTCA
GTTTTTTACTTACTCATTGCTTCCCCAAGACTGCAAGGCAGAGGGGTGTAAATGTTCCTTAAGGTTATCC
ACGGATGGCTCTCCAACTAGGATCACCTATGAGGCACAGGGGAGCTCTGGTTATTCTCTGAGACTGTGTA
AAGTTGTGGAGAGCTCTGACTGTACGACAAAAATAAATGCACGTATTGTGGGAGGAACAAACTCTTCTTT
AGGAGAGTGGCCATGGCAGGTCAGCCTGCAAGTAAAGTTGGTTTCTCAGAATCATATGTGTGGAGGGTCC
ATCATTGGACGCCAATGGATACTGACGGCTGCCCATTGCTTTGATGGGATTCCCTATCCAGACGTGTGGC
GTATATATGGCGGGATTCTTAATCTGTCAGAGATTACAAACAAAACGCCTTTCTCAAGTATAAAGGAGCT
TATTATTCATCAGAAATACAAAATGTCAGAAGGCAGTTACGATATTGCCTTAATAAAGCTTCAGACACCG
TTGAATTATACTGAATTCCAAAAACCAATATGCCTGCCTTCCAAAGCTGACACAAATACAATTTATACCA
ACTGOTGGGTGACTGGATGGGGCTACACAAAGGAACGAGGTGAGACCCAAAATATTCTACAAAAGGCAAC
TATTCCCTTGGTACCAAATGAAGAATGCCAGAAAAAATATAGAGATTATGTTATAACCAAGCAGATGATC
TGTGCTGGCTACAAAGAAGGTGGAATAGATGCTTGTAAGGGAGATTCCGGTGGCCCCTTAGTTTGCAAAC
ATAGTGGAAGGTGGCAGTTGGTGGGTATCACCAGCTGGGGCGAAGGCTGTGCCCGCAAGGAGCAACCAGG
AGTCTACACCAAAGTTGCTGAGTACATTGACTGGATATTGGAGAAGATACAGAGCAGCAAGGAAAGAGCT
CTGGAGACATCTCCAGCATGAGGAGGCTGGGTACTGATGGGGAAGAGCCCAGCTGGCACCAGCTTTACCA
CCTGCCCTCAAGTCCTACTAGAGCTCCAGAGTTCTCTTCTGCAAAATGTCGATAGTGGTGTCTACCTCGC
ATCCTTACCATAGGATTAAAAGTCCAAATGTAGACACAGTTGCTAAAGACAGCGCCATGCTCAAGCGTGC
TTCCTGCCTTGAGCAACAGGAACGCCAATGAGAACTATCCAAAGATTACCAAGCCTGTTTGGAAATAAAA
TGGTCAAAGGATTTTTATTAGGTAGTGAAATTAGGTAGTTGTCCTTGGAACCATTCTCATGTAACTGTTG
ACTCTGGACCTCAGCAGATCACAGTTACCTTCTGTCCACTTCTGACATTTGTGTACTGGAACCTGATGCT
GTTCTTCCACTTGGAGCAAAGAACTGAGAAACCTGGTTCTATCCATTGGGAAAAAGAGATCTTTGTAACA
TTTCCTTTACAATAAAAAGATGTTCTACTTGGACTTGAAAAAAAAAAAAAAAAAAAAAAAAAA

### Display Libraries

[0660] A display library is a collection of entities; each entity includes an accessible polypeptide component and a recoverable component that encodes or identifies the polypeptide component. The polypeptide component is varied so that different amino acid sequences are represented. The polypeptide component can be of any length, e.g. from three amino acids to over 300 amino acids. A display library entity can include more than one polypeptide component, for example, the two polypeptide chains of a sFab. In one exemplary implementation, a display library can be used to identify proteins that bind to plasma kallikrein. In a selection, the polypeptide component of each member of the library is probed with plasma kallikrein (or fragment thereof) and if the polypeptide component binds to the plasma kallikrein, the display library member is identified, typically by retention on a support.

[0661] Retained display library members are recovered from the support and analyzed. The analysis can include amplification and a subsequent selection under similar or dissimilar conditions. For example, positive and negative selections can be alternated. The analysis can also include determining the amino acid sequence of the polypeptide component and purification of the polypeptide component for detailed characterization.

[0662] A variety of formats can be used for display libraries. Examples include the following.

[0663] Phage Display: The protein component is typically covalently linked to a bacteriophage coat protein. The linkage results from translation of a nucleic acid encoding the protein component fused to the coat protein. The linkage can include a flexible peptide linker, a protease site, or an amino acid incorporated as a result of suppression of a stop codon. Phage display is described, for example, in U.S. Pat. No. 5,223,409; Smith (1985) Science 228:1315-1317; WO 92/18619; WO 91/17271; WO 92/20791; WO 92/15679; WO 93/01288; WO 92/01047; WO 92/09690; WO 90/02809; de Haard et al. (1999) J. Biol. Chem 274:18218-30; Hoogenboom et al. (1998) Immunotechnology 4:1-20; Hoogenboom et al. (2000) Immunol Today 2:371-8 and Hoet et al. (2005) Nat Biotechnol. 23(3) 344-8. Bacteriophage displaying the protein component can be grown and harvested using standard phage preparatory methods, e.g. PEG precipitation from growth media. After selection of individual display phages, the nucleic acid encoding the selected protein components can be isolated from cells infected with the selected phages or from the phage themselves, after amplification. Individual colonies or plaques can be picked, the nucleic acid isolated and sequenced.

[0664] Other Display Formats. Other display formats include cell based display (see, e.g., WO 03/029456), protein-nucleic acid fusions (see, e.g., U.S. Pat. No. 6,207,446), ribosome display (See, e.g., Mattheakis et al. (1994) Proc. Natl. Acad. Sci. USA 91:9022 and Hanes et al. (2000) Nat Biotechnol. 18:1287-92; Hanes et al. (2000) Methods Enzymol. 328:404-30; and Schaffitzel et al. (1999) J Immunol Methods. 231(1-2): 119-35), and E. coli periplasmic display (J Immunol Methods. 2005 Nov. 22; PMID: 16337958).

[0665] Scaffolds. Scaffolds useful for display include: antibodies (e.g., Fab fragments, single chain Fv molecules (scFv), single domain antibodies, camelid antibodies, and camelized antibodies); T-cell receptors; MHC proteins; extracellular domains (e.g., fibronectin Type III repeats, EGF repeats); protease inhibitors (e.g., Kunitz domains, ecotin, BPTI, and so forth); TPR repeats; trifoil structures; zinc finger domains; DNA-binding proteins; particularly monomeric DNA binding proteins; RNA binding proteins; enzymes, e.g., proteases (particularly inactivated proteases), RNase; chaperones, e.g., thioredoxin and heat shock proteins; intracellular signaling domains (such as SH2 and SH3 domains); linear and constrained peptides; and linear peptide substrates. Display libraries can include synthetic and/or natural diversity. See, e.g., U.S. 2004-0005709.

[0666] Display technology can also be used to obtain binding proteins (e.g., antibodies) that bind particular epitopes of a target. This can be done, for example, by using competing non-target molecules that lack the particular epitope or are mutated within the epitope, e.g., with alanine. Such non-target molecules can be used in a negative selection procedure as described below, as competing molecules when binding a display library to the target, or as a pre-elution agent, e.g., to capture in a wash solution dissociating display library members that are not specific to the target.

[0667] Iterative Selection. In one preferred embodiment, display library technology is used in an iterative mode. A first display library is used to identify one or more binding proteins for a target. These identified binding proteins are then varied using a mutagenesis method to form a second display library. Higher affinity binding proteins are then selected from the second library, e.g., by using higher stringency or more competitive binding and washing conditions.

[0668] In some implementations, the mutagenesis is targeted to regions at the binding interface. If, for example, the identified binding proteins are antibodies, then mutagenesis can be directed to the CDR regions of the heavy or light chains as described herein. Further, mutagenesis can be directed to framework regions near or adjacent to the CDRs. In the case of antibodies, mutagenesis can also be limited to one or a few of the CDRs, e.g., to make precise step-wise improvements. Exemplary mutagenesis techniques include: error-prone PCR, recombination, DNA shuffling, site-directed mutagenesis and cassette mutagenesis.

[0669] In one example of iterative selection, the methods described herein are used to first identify a protein from a display library that binds plasma kallikrein, with at least a minimal binding specificity for a target or a minimal activity, e.g., an equilibrium dissociation constant for binding of less than 0.5 nM, 1 nM, 10 nM, or 100 nM. The nucleic acid sequences encoding the initial identified proteins are used as a template nucleic acid for the introduction of variations, e.g., to identify a second protein that has enhanced properties (e.g., binding affinity, kinetics, or stability) relative to the initial protein.

[0670] Off-Rate Selection. Since a slow dissociation rate can be predictive of high affinity, particularly with respect to interactions between polypeptides and their targets, the methods described herein can be used to isolate binding proteins with a desired (e.g., reduced) kinetic dissociation rate for a binding interaction to a target.

[0671] To select for slow dissociating binding proteins from a display library, the library is contacted to an immobilized target. The immobilized target is then washed with a first solution that removes non-specifically or weakly bound biomolecules. Then the bound binding proteins are eluted with a second solution that includes a saturating amount of free target or a target specific high-affinity competing monoclonal antibody, i.e., replicates of the target that are not attached to the particle. The free target binds to biomolecules that dissociate from the target. Rebinding is effectively prevented by the saturating amount of free target relative to the much lower concentration of immobilized target.

[0672] The second solution can have solution conditions that are substantially physiological or that are stringent. Typically, the solution conditions of the second solution are identical to the solution conditions of the first solution. Fractions of the second solution are collected in temporal order to distinguish early from late fractions. Later fractions include biomolecules that dissociate at a slower rate from the target than biomolecules in the early fractions.

[0673] Further, it is also possible to recover display library members that remain bound to the target even after extended incubation. These can either be dissociated using chaotropic conditions or can be amplified while attached to the target. For example, phage bound to the target can be contacted to bacterial cells.

[0674] Selecting or Screening for Specificity. The display library screening methods described herein can include a selection or screening process that discards display library members that bind to a non-target molecule. Examples of non-target molecules include streptavidin on magnetic beads, blocking agents such as bovine serum albumin, non-fat bovine milk, soy protein, any capturing or target immobilizing monoclonal antibody, or non-transfected cells which do not express the target.

[0675] In one implementation, a so-called “negative selection” step is used to discriminate between the target and related non-target molecule and a related, but distinct non-target molecule. The display library or a pool thereof is contacted to the non-target molecule. Members of the sample that do not bind the non-target are collected and used in subsequent selections for binding to the target molecule or even for subsequent negative selections. The negative selection step can be prior to or after selecting library members that bind to the target molecule.

[0676] In another implementation, a screening step is used. After display library members are isolated for binding to the target molecule, each isolated library member is tested for its ability to bind to a non-target molecule (e.g., a non-target listed above). For example, a high-throughput ELISA screen can be used to obtain this data. The ELISA screen can also be used to obtain quantitative data for binding of each library member to the target as well as for cross species reactivity to related targets or subunits of the target (e.g., plasma kallikrein) and also under different condition such as pH 6 or pH 7.5. The non-target and target binding data are compared (e.g., using a computer and software) to identify library members that specifically bind to the target.

### Other Exemplary Expression Libraries

[0677] Other types of collections of proteins (e.g., expression libraries) can be used to identify proteins with a particular property (e.g., ability to bind plasma kallikrein), including, e.g., protein arrays of antibodies (see, e.g., De Wildt et al. (2000) Nat. Biotechnol. 18:989-994), lambda gt11 libraries, two-hybrid libraries and so forth.

### Exemplary Libraries

[0678] It is possible to immunize a non-human primate and recover primate antibody genes that can be displayed on phage (see below). From such a library, one can select antibodies that bind the antigen used in immunization. See, for example, Vaccine. (2003) 22(2): 257-67 or Immunogenetics. (2005) 57(10): 730-8. Thus one could obtain primate antibodies that bind and inhibit plasma kallikrein by immunizing a chimpanzee or macaque and using a variety of means to select or screen for primate antibodies that bind and inhibit plasma kallikrein. One can also make chimeras of primatized Fabs with human constant regions, see Curr Opin Mol Ther. (2004) 6(6):675-83. “PRIMATIZED antibodies, genetically engineered from cynomolgus macaque monkey and human components, are structurally indistinguishable from human antibodies. They may, therefore, be less likely to cause adverse reactions in humans, making them potentially suited for long-term, chronic treatment” Curr Opin Investig Drugs. (2001) 2(5): 635-8.

[0679] One exemplary type of library presents a diverse pool of polypeptides, each of which includes an immunoglobulin domain, e.g., an immunoglobulin variable domain. Of interest are display libraries where the members of the library include primate or “primatized” (e.g., such as human, non-human primate or “humanized”) immunoglobin domains (e.g., immunoglobin variable domains) or chimeric primatized Fabs with human constant regions. Human or humanized immunoglobin domain libraries may be used to identify human or “humanized” antibodies that, for example, recognize human antigens. Because the constant and framework regions of the antibody are human, these antibodies may avoid themselves being recognized and targeted as antigens when administered to humans. The constant regions may also be optimized to recruit effector functions of the human immune system. The in vitro display selection process surmounts the inability of a normal human immune system to generate antibodies against self-antigens.

[0680] A typical antibody display library displays a polypeptide that includes a VH domain and a VL domain. An “immunoglobulin domain” refers to a domain from the variable or constant domain of immunoglobulin molecules. Immunoglobulin domains typically contain two β-sheets formed of about seven β-strands, and a conserved disulphide bond (see, e.g., A. F. Williams and A. N. Barclay, 1988, Ann. Rev. Immunol. 6:381-405). The display library can display the antibody as a Fab fragment (e.g., using two polypeptide chains) or a single chain Fv (e.g., using a single polypeptide chain). Other formats can also be used.

[0681] As in the case of the Fab and other formats, the displayed antibody can include one or more constant regions as part of a light and/or heavy chain. In one embodiment, each chain includes one constant region, e.g., as in the case of a Fab. In other embodiments, additional constant regions are displayed.

[0682] Antibody libraries can be constructed by a number of processes (see, e.g., de Haard et al., 1999, J. Biol. Chem. 274:18218-30; Hoogenboom et al., 1998, Immunotechnology 4:1-20; Hoogenboom et al., 2000, Immunol. Today 21:371-378, and Hoet et al. (2005) Nat Biotechnol. 23(3): 344-8. Further, elements of each process can be combined with those of other processes. The processes can be used such that variation is introduced into a single immunoglobulin domain (e.g., VH or VL) or into multiple immunoglobulin domains (e.g., VH and VL). The variation can be introduced into an immunoglobulin variable domain, e.g., in the region of one or more of CDR1, CDR2, CDR3, FR1, FR2, FR3, and/or FR4, referring to such regions of either and both of heavy and light chain variable domains. For example, the variation(s) may be introduced into all three CDRs of a given variable domain, or into CDR1 and CDR2, e.g., of a heavy chain variable domain. Any combination is feasible. In one process, antibody libraries are constructed by inserting diverse oligonucleotides that encode CDRs into the corresponding regions of the nucleic acid. The oligonucleotides can be synthesized using monomeric nucleotides or trinucleotides. For example, Knappik et al., 2000, J. Mol. Biol. 296:57-86 describe a method for constructing CDR encoding oligonucleotides using trinucleotide synthesis and a template with engineered restriction sites for accepting the oligonucleotides.

[0683] In another process, an animal (e.g., a rodent) is immunized with plasma kallikrein. The animal is optionally boosted with the antigen to further stimulate the response. Then spleen cells are isolated from the animal, and nucleic acid encoding VH and/or VL domains is amplified and cloned for expression in the display library.

[0684] In yet another process, antibody libraries are constructed from nucleic acid amplified from naïve germline immunoglobulin genes. The amplified nucleic acid includes nucleic acid encoding the VH and/or VL domain. Sources of immunoglobulin-encoding nucleic acids are described below. Amplification can include PCR, e.g., with primers that anneal to the conserved constant region, or another amplification method.

[0685] Nucleic acid encoding immunoglobulin domains can be obtained from the immune cells of, e.g., a primate (e.g., a human), mouse, rabbit, camel, or rodent. In one example, the cells are selected for a particular property. B cells at various stages of maturity can be selected. In another example, the B cells are naïve.

[0686] In one embodiment, fluorescent-activated cell sorting (FACS) is used to sort B cells that express surface-bound IgM, IgD, or IgG molecules. Further, B cells expressing different isotypes of IgG can be isolated. In another preferred embodiment, the B or T cells are cultured in vitro. The cells can be stimulated in vitro, e.g., by culturing with feeder cells or by adding mitogens or other modulatory reagents, such as antibodies to CD40, CD40 ligand or CD20, phorbol myristate acetate, bacterial lipopolysaccharide, concanavalin A, phytohemagglutinin, or pokeweed mitogen.

[0687] In another embodiment, the cells are isolated from a subject that has a disease of condition described herein, e.g., a plasma kallikrein associated disease or condition. In one preferred embodiment, the cells have activated a program of somatic hypermutation. Cells can be stimulated to undergo somatic mutagenesis of immunoglobulin genes, for example, by treatment with anti-immunoglobulin, anti-CD40, and anti-CD38 antibodies (see, e.g., Bergthorsdottir et al., 2001, J. Immunol. 166:2228). In another embodiment, the cells are naïve.

[0688] The nucleic acid encoding an immunoglobulin variable domain can be isolated from a natural repertoire by the following exemplary method. First, RNA is isolated from the immune cell. Full length (i.e., capped) mRNAs are separated (e.g. by degrading uncapped RNAs with calf intestinal phosphatase). The cap is then removed with tobacco acid pyrophosphatase and reverse transcription is used to produce the cDNAs.

[0689] The reverse transcription of the first (antisense) strand can be done in any manner with any suitable primer. See, e.g., de Haard et al., 1999, J. Biol. Chem. 274:18218-30. The primer binding region can be constant among different immunoglobulins, e.g., in order to reverse transcribe different isotypes of immunoglobulin. The primer binding region can also be specific to a particular isotype of immunoglobulin. Typically, the primer is specific for a region that is 3′ to a sequence encoding at least one CDR. In another embodiment, poly-dT primers may be used (and may be preferred for the heavy-chain genes).

[0690] A synthetic sequence can be ligated to the 3′ end of the reverse transcribed strand. The synthetic sequence can be used as a primer binding site for binding of the forward primer during PCR amplification after reverse transcription. The use of the synthetic sequence can obviate the need to use a pool of different forward primers to fully capture the available diversity.

[0691] The variable domain-encoding gene is then amplified, e.g., using one or more rounds. If multiple rounds are used, nested primers can be used for increased fidelity. The amplified nucleic acid is then cloned into a display library vector.

### Secondary Screening Methods

[0692] After selecting candidate library members that bind to a target, each candidate library member can be further analyzed, e.g., to further characterize its binding properties for the target, e.g., plasma kallikrein. Each candidate library member can be subjected to one or more secondary screening assays. The assay can be for a binding property, a catalytic property, an inhibitory property, a physiological property (e.g., cytotoxicity, renal clearance, immunogenicity), a structural property (e.g., stability, conformation, oligomerization state) or another functional property. The same assay can be used repeatedly, but with varying conditions, e.g., to determine pH, ionic, or thermal sensitivities.

[0693] As appropriate, the assays can use a display library member directly, a recombinant polypeptide produced from the nucleic acid encoding the selected polypeptide, or a synthetic peptide synthesized based on the sequence of the selected polypeptide. In the case of selected Fabs, the Fabs can be evaluated or can be modified and produced as intact IgG proteins. Exemplary assays for binding properties include the following.

[0694] ELISA. Binding proteins can be evaluated using an ELISA assay. For example, each protein is contacted to a microtitre plate whose bottom surface has been coated with the target, e.g., a limiting amount of the target. The plate is washed with buffer to remove non-specifically bound polypeptides. Then the amount of the binding protein bound to the target on the plate is determined by probing the plate with an antibody that can recognize the binding protein, e.g., a tag or constant portion of the binding protein. The antibody is linked to a detection system (e.g., an enzyme such as alkaline phosphatase or horse radish peroxidase (HRP) which produces a colorimetric product when appropriate substrates are provided).

[0695] Homogeneous Binding Assays. The ability of a binding protein described herein to bind a target can be analyzed using a homogenous assay, i.e., after all components of the assay are added, additional fluid manipulations are not required. For example, fluorescence resonance energy transfer (FRET) can be used as a homogenous assay (see, for example, Lakowicz et al., U.S. Pat. No. 5,631,169; Stavrianopoulos, et al., U.S. Pat. No. 4,868,103). A fluorophore label on the first molecule (e.g., the molecule identified in the fraction) is selected such that its emitted fluorescent energy can be absorbed by a fluorescent label on a second molecule (e.g., the target) if the second molecule is in proximity to the first molecule. The fluorescent label on the second molecule fluoresces when it absorbs to the transferred energy. Since the efficiency of energy transfer between the labels is related to the distance separating the molecules, the spatial relationship between the molecules can be assessed. In a situation in which binding occurs between the molecules, the fluorescent emission of the ‘acceptor’ molecule label in the assay should be maximal. A binding event that is configured for monitoring by FRET can be conveniently measured through standard fluorometric detection means, e.g., using a fluorimeter. By titrating the amount of the first or second binding molecule, a binding curve can be generated to estimate the equilibrium binding constant.

[0696] Another example of a homogenous assay is ALPHASCREEN™ (Packard Bioscience, Meriden CT). ALPHASCREEN™ uses two labeled beads. One bead generates singlet oxygen when excited by a laser. The other bead generates a light signal when singlet oxygen diffuses from the first bead and collides with it. The signal is only generated when the two beads are in proximity. One bead can be attached to the display library member, the other to the target. Signals are measured to determine the extent of binding.

[0697] Surface Plasmon Resonance (SPR). The interaction of binding protein and a target can be analyzed using SPR. SPR or Biomolecular Interaction Analysis (BIA) detects biospecific interactions in real time, without labeling any of the interactants. Changes in the mass at the binding surface (indicative of a binding event) of the BIA chip result in alterations of the refractive index of light near the surface (the optical phenomenon of surface plasmon resonance (SPR)). The changes in the refractivity generate a detectable signal, which are measured as an indication of real-time reactions between biological molecules. Methods for using SPR are described, for example, in U.S. Pat. No. 5,641,640; Raether, 1988, Surface Plasmons Springer Verlag; Sjolander and Urbaniczky, 1991, Anal. Chem. 63:2338-2345; Szabo et al., 1995, Curr. Opin. Struct. Biol. 5:699-705 and on-line resources provide by BIAcore International AB (Uppsala, Sweden).

[0698] Information from SPR can be used to provide an accurate and quantitative measure of the equilibrium dissociation constant (K_{D}), and kinetic parameters, including Kₒₙ and K_{off}, for the binding of a binding protein to a target. Such data can be used to compare different biomolecules. For example, selected proteins from an expression library can be compared to identify proteins that have high affinity for the target or that have a slow K_{off}. This information can also be used to develop structure-activity relationships (SAR). For example, the kinetic and equilibrium binding parameters of matured versions of a parent protein can be compared to the parameters of the parent protein. Variant amino acids at given positions can be identified that correlate with particular binding parameters, e.g., high affinity and slow K_{off}. This information can be combined with structural modeling (e.g., using homology modeling, energy minimization, or structure determination by x-ray crystallography or NMR). As a result, an understanding of the physical interaction between the protein and its target can be formulated and used to guide other design processes.

[0699] Cellular Assays. Binding proteins can be screened for ability to bind to cells which transiently or stably express and display the target of interest on the cell surface. For example, plasma kallikrein binding proteins can be fluorescently labeled and binding to plasma kallikrein in the presence of absence of antagonistic antibody can be detected by a change in fluorescence intensity using flow cytometry e.g., a FACS machine.

### Other Exemplary Methods for Obtaining Plasma Kallikrein Binding Proteins

[0700] In addition to the use of display libraries, other methods can be used to obtain a plasma kallikrein binding protein (e.g., antibody). For example, plasma kallikrein protein or a fragment thereof can be used as an antigen in a non-human animal, e.g., a rodent. In one embodiment, the non-human animal includes at least a part of a human immunoglobulin gene. For example, it is possible to engineer mouse strains deficient in mouse antibody production with large fragments of the human Ig loci. Using the hybridoma technology, antigen-specific monoclonal antibodies (Mabs) derived from the genes with the desired specificity may be produced and selected. See, e.g., XENOMOUSE™, Green et al., 1994, Nat. Gen. 7:13-21; U.S. 2003-0070185, WO 96/34096, published Oct. 31, 1996, and PCT Application No. PCT/US96/05928, filed Apr. 29, 1996.

[0701] In another embodiment, a monoclonal antibody is obtained from the non-human animal, and then modified, e.g., humanized or deimmunized. Winter describes a CDR-grafting method that may be used to prepare the humanized antibodies (UK Patent Application GB 2188638A, filed on Mar. 26, 1987; U.S. Pat. No. 5,225,539. All of the CDRs of a particular human antibody may be replaced with at least a portion of a non-human CDR or only some of the CDRs may be replaced with non-human CDRs. It is only necessary to replace the number of CDRs required for binding of the humanized antibody to a predetermined antigen.

[0702] Humanized antibodies can be generated by replacing sequences of the Fv variable region that are not directly involved in antigen binding with equivalent sequences from human Fv variable regions. General methods for generating humanized antibodies are provided by Morrison, S. L., 1985, Science 229:1202-1207, by Oi et al., 1986, BioTechniques 4:214, and by Queen et al. U.S. Pat. Nos. 5,585,089, 5,693,761 and 5,693,762. Those methods include isolating, manipulating, and expressing the nucleic acid sequences that encode all or part of immunoglobulin Fv variable regions from at least one of a heavy or light chain. Numerous sources of such nucleic acid are available.

[0703] For example, nucleic acids may be obtained from a hybridoma producing an antibody against a predetermined target, as described above. The recombinant DNA encoding the humanized antibody, or fragment thereof, can then be cloned into an appropriate expression vector.

### Reducing Immunogenicity of Plasma Kallikrein Binding Proteins

[0704] Immunoglobin plasma kallikrein binding proteins (e.g., IgG or Fab plasma kallikrein binding proteins) may be modified to reduce immunogenicity. Reduced immunogenicity is desirable in plasma kallikrein binding proteins intended for use as therapeutics, as it reduces the chance that the subject will develop an immune response against the therapeutic molecule. Techniques useful for reducing immunogenicity of plasma kallikrein binding proteins include deletion/modification of potential human T cell epitopes and “germlining” of sequences outside of the CDRs (e.g., framework and Fc).

[0705] A plasma kallikrein-binding antibody may be modified by specific deletion of human T cell epitopes or “deimmunization,” e.g., by the methods disclosed in WO 98/52976 and WO 00/34317. Briefly, the heavy and light chain variable regions of an antibody are analyzed for peptides that bind to MHC Class II; these peptides represent potential T-cell epitopes (as defined in WO 98/52976 and WO 00/34317). For detection of potential T-cell epitopes, a computer modeling approach termed “peptide threading” can be applied, and in addition a database of human MHC class II binding peptides can be searched for motifs present in the VH and VL sequences, as described in WO 98/52976 and WO 00/34317. These motifs bind to any of the 18 major MHC class II DR allotypes, and thus constitute potential T cell epitopes. Potential T-cell epitopes detected can be eliminated by substituting small numbers of amino acid residues in the variable regions, or preferably, by single amino acid substitutions. As far as possible conservative substitutions are made, often but not exclusively, an amino acid common at this position in human germline antibody sequences may be used. Human germline sequences are disclosed in Tomlinson, I. A. et al., 1992, J. Mol. Biol. 227:776-798; Cook, G. P. et al., 1995, Immunol. Today Vol. 16(5): 237-242; Chothia, D. et al., 1992, J. Mol. Bio. 227:799-817. The V BASE directory provides a comprehensive directory of human immunoglobulin variable region sequences (compiled by Tomlinson, I. A. et al. MRC Centre for Protein Engineering, Cambridge, UK). After the deimmunizing changes are identified, nucleic acids encoding VH and VL can be constructed by mutagenesis or other synthetic methods (e.g., de novo synthesis, cassette replacement, and so forth). Mutagenized variable sequence can, optionally, be fused to a human constant region, e.g., human IgG1 or κ constant regions.

[0706] In some cases a potential T cell epitope will include residues which are known or predicted to be important for antibody function. For example, potential T cell epitopes are usually biased towards the CDRs. In addition, potential T cell epitopes can occur in framework residues important for antibody structure and binding. Changes to eliminate these potential epitopes will in some cases require more scrutiny, e.g., by making and testing chains with and without the change. Where possible, potential T cell epitopes that overlap the CDRs were eliminated by substitutions outside the CDRs. In some cases, an alteration within a CDR is the only option, and thus variants with and without this substitution should be tested. In other cases, the substitution required to remove a potential T cell epitope is at a residue position within the framework that might be critical for antibody binding. In these cases, variants with and without this substitution should be tested. Thus, in some cases several variant deimmunized heavy and light chain variable regions were designed and various heavy/light chain combinations tested in order to identify the optimal deimmunized antibody. The choice of the final deimmunized antibody can then be made by considering the binding affinity of the different variants in conjunction with the extent of deimmunization, i.e., the number of potential T cell epitopes remaining in the variable region. Deimmunization can be used to modify any antibody, e.g., an antibody that includes a non-human sequence, e.g., a synthetic antibody, a murine antibody other non-human monoclonal antibody, or an antibody isolated from a display library.

[0707] Plasma kallikrein binding antibodies are “germlined” by reverting one or more non-germline amino acids in framework regions to corresponding germline amino acids of the antibody, so long as binding properties are substantially retained. Similar methods can also be used in the constant region, e.g., in constant immunoglobulin domains.

[0708] Antibodies that bind to plasma kallikrein, e.g., an antibody described herein, may be modified in order to make the variable regions of the antibody more similar to one or more germline sequences. For example, an antibody can include one, two, three, or more amino acid substitutions, e.g., in a framework, CDR, or constant region, to make it more similar to a reference germline sequence. One exemplary germlining method can include identifying one or more germline sequences that are similar (e.g., most similar in a particular database) to the sequence of the isolated antibody. Mutations (at the amino acid level) are then made in the isolated antibody, either incrementally or in combination with other mutations. For example, a nucleic acid library that includes sequences encoding some or all possible germline mutations is made. The mutated antibodies are then evaluated, e.g., to identify an antibody that has one or more additional germline residues relative to the isolated antibody and that is still useful (e.g., has a functional activity). In one embodiment, as many germline residues are introduced into an isolated antibody as possible.

[0709] In one embodiment, mutagenesis is used to substitute or insert one or more germline residues into a framework and/or constant region. For example, a germline framework and/or constant region residue can be from a germline sequence that is similar (e.g., most similar) to the non-variable region being modified. After mutagenesis, activity (e.g., binding or other functional activity) of the antibody can be evaluated to determine if the germline residue or residues are tolerated (i.e., do not abrogate activity). Similar mutagenesis can be performed in the framework regions.

[0710] Selecting a germline sequence can be performed in different ways. For example, a germline sequence can be selected if it meets a predetermined criteria for selectivity or similarity, e.g., at least a certain percentage identity, e.g., at least 75, 80, 85, 90, 91, 92, 93, 94, 95, 96, 97, 98, 99, or 99.5% identity. The selection can be performed using at least 2, 3, 5, or 10 germline sequences. In the case of CDR1 and CDR2, identifying a similar germline sequence can include selecting one such sequence. In the case of CDR3, identifying a similar germline sequence can include selecting one such sequence, but may include using two germline sequences that separately contribute to the amino-terminal portion and the carboxy-terminal portion of the sequence. In other implementations more than one or two germline sequences are used, e.g., to form a consensus sequence.

[0711] In one embodiment, with respect to a particular reference variable domain sequence, e.g., a sequence described herein, a related variable domain sequence has at least 30, 40, 50, 60, 70, 80, 90, 95 or 100% of the CDR amino acid positions that are not identical to residues in the reference CDR sequences, residues that are identical to residues at corresponding positions in a human germline sequence (i.e., an amino acid sequence encoded by a human germline nucleic acid).

[0712] In one embodiment, with respect to a particular reference variable domain sequence, e.g., a sequence described herein, a related variable domain sequence has at least 30, 50, 60, 70, 80, 90 or 100% of the FR regions identical to FR sequence from a human germline sequence, e.g., a germline sequence related to the reference variable domain sequence.

[0713] Accordingly, it is possible to isolate an antibody which has similar activity to a given antibody of interest, but is more similar to one or more germline sequences, particularly one or more human germline sequences. For example, an antibody can be at least 90, 91, 92, 93, 94, 95, 96, 97, 98, 99, or 99.5% identical to a germline sequence in a region outside the CDRs (e.g., framework regions). Further, an antibody can include at least 1, 2, 3, 4, or 5 germline residues in a CDR region, the germline residue being from a germline sequence of similar (e.g., most similar) to the variable region being modified. Germline sequences of primary interest are human germline sequences. The activity of the antibody (e.g., the binding activity as measured by K_{A}) can be within a factor or 100, 10, 5, 2, 0.5, 0.1, and 0.001 of the original antibody.

[0714] Germline sequences of human immunoglobin genes have been determined and are available from a number of sources, including the INTERNATIONAL IMMUNOGENETICS INFORMATION SYSTEM® (IMGT), and the V BASE directory (compiled by Tomlinson, I. A. et al. MRC Centre for Protein Engineering, Cambridge, UK).

[0715] Exemplary germline reference sequences for Vkappa include: O12/O2, O18/O8, A20, A30, L14, L1, L15, L4/18a, L5/L19, L8, L23, L9,L24, L11, L12, O11/O1, A17, A1, A18, A2, A19/A3, A23, A27, A11, L2/L16, L6, L20, L25, B3, B2, A26/A10, and A14. See, e.g., Tomlinson et al., 1995, EMBO J. 14(18): 4628-3.

[0716] A germline reference sequence for the HC variable domain can be based on a sequence that has particular canonical structures, e.g., 1-3 structures in the H1 and H2 hypervariable loops. The canonical structures of hypervariable loops of an immunoglobulin variable domain can be inferred from its sequence, as described in Chothia et al., 1992, J. Mol. Biol. 227:799-817; Tomlinson et al., 1992, J. Mol. Biol. 227:776-798); and Tomlinson et al., 1995, EMBO J. 14(18): 4628-38. Exemplary sequences with a 1-3 structure include: DP-1, DP-8, DP-12, DP-2, DP-25, DP-15, DP-7, DP-4, DP-31, DP-32, DP-33, DP-35, DP-40, 7-2, hv3005, hv3005f3, DP-46, DP-47, DP-58, DP-49, DP-50, DP-51, DP-53, and DP-54.

### Protein Production

[0717] Standard recombinant nucleic acid methods can be used to express a protein that binds to plasma kallikrein. Generally, a nucleic acid sequence encoding the protein is cloned into a nucleic acid expression vector. Of course, if the protein includes multiple polypeptide chains, each chain can be cloned into an expression vector, e.g., the same or different vectors, that are expressed in the same or different cells.

[0718] Antibody Production. Some antibodies, e.g., Fabs, can be produced in bacterial cells, e.g., E. coli cells (see e.g., Nadkarni, A. et al., 2007 Protein Expr Purif 52(1): 219-29). For example, if the Fab is encoded by sequences in a phage display vector that includes a suppressible stop codon between the display entity and a bacteriophage protein (or fragment thereof), the vector nucleic acid can be transferred into a bacterial cell that cannot suppress a stop codon. In this case, the Fab is not fused to the gene III protein and is secreted into the periplasm and/or media.

[0719] Antibodies can also be produced in eukaryotic cells. In one embodiment, the antibodies (e.g., scFv's) are expressed in a yeast cell such as Pichia (see, e.g., Powers et al., 2001, J. Immunol. Methods. 251:123-35; Schoonooghe S. et al., 2009 BMC Biotechnol. 9:70; Abdel-Salam, H A. et al., 2001 Appl Microbiol Biotechnol 56(1-2): 157-64; Takahashi K. et al., 2000 Biosci Biotechnol Biochem 64(10): 2138-44; Edqvist, J. et al., 1991 J Biotechnol 20(3): 291-300), Hanseula, or Saccharomyces. One of skill in the art can optimize antibody production in yeast by optimizing, for example, oxygen conditions (see e.g., Baumann K., et al. 2010 BMC Syst. Biol. 4:141), osmolarity (see e.g., Dragosits, M. et al., 2010 BMC Genomics 11:207), temperature (see e.g., Dragosits, M. et al., 2009 J Proteome Res. 8(3): 1380-92), fermentation conditions (see e.g., Ning, D. et al. 2005 J. Biochem, and Mol. Biol. 38(3): 294-299), strain of yeast (see e.g., Kozyr, A V et al. 2004 Mol Biol (Mosk) 38(6): 1067-75; Horwitz, A H. et al., 1988 Proc Natl Acad Sci USA 85(22): 8678-82; Bowdish, K. et al. 1991 J Biol Chem 266(18): 11901-8), overexpression of proteins to enhance antibody production (see e.g., Gasser, B. et al., 2006 Biotechol. Bioeng. 94(2): 353-61), level of acidity of the culture (see e.g., Kobayashi H., et al., 1997 FEMS Microbiol Lett 152(2): 235-42), concentrations of substrates and/or ions (see e.g., Ko J H. et al., 2996 Appl Biochem Biotechnol 60(1): 41-8). In addition, yeast systems can be used to produce antibodies with an extended half-life (see e.g., Smith, B J. et al. 2001 Bioconjug Chem 12(5): 750-756),

[0720] In one preferred embodiment, antibodies are produced in mammalian cells. Preferred mammalian host cells for expressing the clone antibodies or antigen-binding fragments thereof include Chinese Hamster Ovary (CHO cells) (including dhfr-CHO cells, described in Urlaub and Chasin, 1980, Proc. Natl. Acad. Sci. USA 77:4216-4220, used with a DHFR selectable marker, e.g., as described in Kaufman and Sharp, 1982, Mol. Biol. 159:601 621), lymphocytic cell lines, e.g., NSO myeloma cells and SP2 cells, COS cells, HEK293T cells (J. Immunol. Methods (2004) 289(1-2): 65-80), and a cell from a transgenic animal, e.g., a transgenic mammal. For example, the cell is a mammary epithelial cell.

[0721] In some embodiments, plasma kallikrein binding proteins are produced in a plant or cell-free based system (see e.g., Galeffi, P., et al., 2006 J Transl Med 4:39).

[0722] In addition to the nucleic acid sequence encoding the diversified immunoglobulin domain, the recombinant expression vectors may carry additional sequences, such as sequences that regulate replication of the vector in host cells (e.g., origins of replication) and selectable marker genes. The selectable marker gene facilitates selection of host cells into which the vector has been introduced (see e.g., U.S. Pat. Nos. 4,399,216, 4,634,665 and 5,179,017). For example, typically the selectable marker gene confers resistance to drugs, such as G418, hygromycin or methotrexate, on a host cell into which the vector has been introduced. Preferred selectable marker genes include the dihydrofolate reductase (DHFR) gene (for use in dhfr host cells with methotrexate selection/amplification) and the neo gene (for G418 selection).

[0723] In an exemplary system for recombinant expression of an antibody, or antigen-binding portion thereof, a recombinant expression vector encoding both the antibody heavy chain and the antibody light chain is introduced into dhfr CHO cells by calcium phosphate-mediated transfection. Within the recombinant expression vector, the antibody heavy and light chain genes are each operatively linked to enhancer/promoter regulatory elements (e.g., derived from SV40, CMV, adenovirus and the like, such as a CMV enhancer/AdMLP promoter regulatory element or an SV40 enhancer/AdMLP promoter regulatory element) to drive high levels of transcription of the genes. The recombinant expression vector also carries a DHFR gene, which allows for selection of CHO cells that have been transfected with the vector using methotrexate selection/amplification. The selected transformant host cells are cultured to allow for expression of the antibody heavy and light chains and intact antibody is recovered from the culture medium. Standard molecular biology techniques are used to prepare the recombinant expression vector, transfect the host cells, select for transformants, culture the host cells and recover the antibody from the culture medium. For example, some antibodies can be isolated by affinity chromatography with a Protein A or Protein G coupled matrix.

[0724] For antibodies that include an Fc domain, the antibody production system may produce antibodies in which the Fc region is glycosylated. For example, the Fc domain of IgG molecules is glycosylated at asparagine 297 in the CH2 domain. This asparagine is the site for modification with biantennary-type oligosaccharides. It has been demonstrated that this glycosylation is required for effector functions mediated by Fcg receptors and complement C1q (Burton and Woof, 1992, Adv. Immunol. 51:1-84; Jefferis et al., 1998, Immunol. Rev. 163:59-76). In one embodiment, the Fc domain is produced in a mammalian expression system that appropriately glycosylates the residue corresponding to asparagine 297. The Fc domain can also include other eukaryotic post-translational modifications.

[0725] Antibodies can also be produced by a transgenic animal. For example, U.S. Pat. No. 5,849,992 describes a method of expressing an antibody in the mammary gland of a transgenic mammal. A transgene is constructed that includes a milk-specific promoter and nucleic acids encoding the antibody of interest and a signal sequence for secretion. The milk produced by females of such transgenic mammals includes, secreted-therein, the antibody of interest. The antibody can be purified from the milk, or for some applications, used directly.

### Characterization of Plasma Kallikrein Binding Proteins

[0726] IC₅₀ (Inhibitory Concentration 50%) and EC₅₀ (Effective Concentration 50%). Within a series or group of binding proteins, those having lower IC₅₀ or EC₅₀ values are considered more potent inhibitors of plasma kallikrein than those binding proteins having higher IC₅₀ or EC₅₀ values. Exemplary binding proteins have an IC₅₀ value of less than 800 nM, 400 nM, 100 nM, 25 nM, 5 nM, or 1 nM, e.g., as measured in an in vitro assay for inhibition of plasma kallikrein activity when the plasma kallikrein is at 2 pM.

[0727] Plasma kallikrein binding proteins may also be characterized with reference to the activity of Factor XII and HMWK (high-molecular-weight kininogen) signaling events, e.g., the production of Factor XIIa and/or bradykinin.

[0728] The binding proteins can also be evaluated for selectivity toward plasma kallikrein. For example, a plasma kallikrein binding protein can be assayed for its potency toward plasma kallikrein and a panel of kallikreins and an IC₅₀ value or EC₅₀ value can be determined for each kallikrein. In one embodiment, a compound that demonstrates a low IC₅₀ value or EC₅₀ value for the plasma kallikrein, and a higher IC₅₀ value or EC₅₀ value, e.g., at least 2-, 5-, or 10-fold higher, for another kallikrein within the test panel is considered to be selective toward plasma kallikrein.

[0729] A pharmacokinetics study in rat, mice, or monkey can be performed with plasma kallikrein binding proteins for determining plasma kallikrein half-life in the serum. Likewise, the effect of the binding protein can be assessed in vivo, e.g., in an animal model for a disease (e.g., carrageenin-induced edema in rat hind paw (Winter et al. Proc Soc Exp Biol Med. 1962; 111:544-7)), for use as a therapeutic, for example, to treat a disease or condition described herein, e.g., a plasma kallikrein associated disorder.

### Pharmaceutical Compositions

[0730] Proteins (e.g., binding proteins) that bind to plasma kallikrein (e.g., human plasma kallikrein and/or murine plasma kallikrein) and, e.g., include at least one immunoglobin variable region can be used in methods for treating (or preventing) a plasma kallikrein associated disease or condition. The binding proteins can be present in a composition, e.g., a pharmaceutically acceptable composition or pharmaceutical composition, which includes a plasma kallikrein-binding protein, e.g., an antibody molecule or other polypeptide or peptide identified as binding to plasma kallikrein, as described herein. The plasma kallikrein binding protein can be formulated together with a pharmaceutically acceptable carrier. Pharmaceutical compositions include therapeutic compositions and diagnostic compositions, e.g., compositions that include labeled plasma kallikrein binding proteins for in vivo imaging, and compositions that include labeled plasma kallikrein binding proteins for treating (or preventing) a plasma kallikrein associated disease.

[0731] A pharmaceutically acceptable carrier includes any and all solvents, dispersion media, coatings, antibacterial and antifungal agents, isotonic and absorption delaying agents, and the like that are physiologically compatible. Preferably, the carrier is suitable for intravenous, intramuscular, subcutaneous, parenteral, spinal, or epidermal administration (e.g., by injection or infusion), although carriers suitable for inhalation and intranasal administration are also contemplated. Depending on the route of administration, the plasma kallikrein binding protein may be coated in a material to protect the compound from the action of acids and other natural conditions that may inactivate the compound.

[0732] A pharmaceutically acceptable salt is a salt that retains the desired biological activity of the compound and does not impart any undesired toxicological effects (see e.g., Berge, S. M., et al., 1977, J. Pharm. Sci. 66:1-19). Examples of such salts include acid addition salts and base addition salts. Acid addition salts include those derived from nontoxic inorganic acids, such as hydrochloric, nitric, phosphoric, sulfuric, hydrobromic, hydroiodic, phosphorous, and the like, as well as from nontoxic organic acids such as aliphatic mono- and dicarboxylic acids, phenyl-substituted alkanoic acids, hydroxy alkanoic acids, aromatic acids, aliphatic and aromatic sulfonic acids, and the like. Base addition salts include those derived from alkaline earth metals, such as sodium, potassium, magnesium, calcium, and the like, as well as from nontoxic organic amines, such as N,N′-dibenzylethylenediamine, N-methylglucamine, chloroprocaine, choline, diethanolamine, ethylenediamine, procaine, and the like.

[0733] The compositions may be in a variety of forms. These include, for example, liquid, semi-solid and solid dosage forms, such as liquid solutions (e.g., injectable and infusible solutions), dispersions or suspensions, tablets, pills, powders, liposomes and suppositories. The form can depend on the intended mode of administration and therapeutic application. Many compositions are in the form of injectable or infusible solutions, such as compositions similar to those used for administration of humans with antibodies. An exemplary mode of administration is parenteral (e.g., intravenous, subcutaneous, intraperitoneal, intramuscular). In one embodiment, the plasma kallikrein binding protein is administered by intravenous infusion or injection. In another preferred embodiment, the plasma kallikrein binding protein is administered by intramuscular or subcutaneous injection.

[0734] The phrases “parenteral administration” and “administered parenterally” as used herein means modes of administration other than enteral and topical administration, usually by injection, and includes, without limitation, intravenous, intramuscular, intraarterial, intrathecal, intracapsular, intraorbital, intracardiac, intradermal, intraperitoneal, transtracheal, subcutaneous, subcuticular, intraarticular, subcapsular, subarachnoid, intraspinal, epidural and intrasternal injection and infusion.

[0735] The composition can be formulated as a solution, microemulsion, dispersion, liposome, or other ordered structure suitable to high drug concentration. Sterile injectable solutions can be prepared by incorporating the binding protein in the required amount in an appropriate solvent with one or a combination of ingredients enumerated above, as required, followed by filtered sterilization. Generally, dispersions are prepared by incorporating the active compound into a sterile vehicle that contains a basic dispersion medium and the required other ingredients from those enumerated above. In the case of sterile powders for the preparation of sterile injectable solutions, the preferred methods of preparation are vacuum drying and freeze-drying that yields a powder of the active ingredient plus any additional desired ingredient from a previously sterile-filtered solution thereof. The proper fluidity of a solution can be maintained, for example, by the use of a coating such as lecithin, by the maintenance of the required particle size in the case of dispersion and by the use of surfactants. Prolonged absorption of injectable compositions can be brought about by including in the composition an agent that delays absorption, for example, monostearate salts and gelatin.

[0736] A plasma kallikrein binding protein can be administered by a variety of methods, although for many applications, the preferred route/mode of administration is intravenous injection or infusion. For example, for therapeutic applications, the plasma kallikrein binding protein can be administered by intravenous infusion at a rate of less than 30, 20, 10, 5, or 1 mg/min to reach a dose of about 1 to 100 mg/m² or 7 to 25 mg/m². The route and/or mode of administration will vary depending upon the desired results. In certain embodiments, the active compound may be prepared with a carrier that will protect the compound against rapid release, such as a controlled release formulation, including implants, and microencapsulated delivery systems. Biodegradable, biocompatible polymers can be used, such as ethylene vinyl acetate, polyanhydrides, polyglycolic acid, collagen, polyorthoesters, and polylactic acid. Many methods for the preparation of such formulations are available. See, e.g., Sustained and Controlled Release Drug Delivery Systems, J.R. Robinson, ed., 1978, Marcel Dekker, Inc., New York.

[0737] Pharmaceutical compositions can be administered with medical devices. For example, in one embodiment, a pharmaceutical composition disclosed herein can be administered with a device, e.g., a needleless hypodermic injection device, a pump, or implant.

[0738] In certain embodiments, a plasma kallikrein binding protein can be formulated to ensure proper distribution in vivo. For example, the blood-brain barrier (BBB) excludes many highly hydrophilic compounds. To ensure that the therapeutic compounds disclosed herein cross the BBB (if desired), they can be formulated, for example, in liposomes. For methods of manufacturing liposomes, see, e.g., U.S. Pat. Nos. 4,522,811; 5,374,548; and 5,399,331. The liposomes may comprise one or more moieties that are selectively transported into specific cells or organs, thus enhance targeted drug delivery (see, e.g., V. V. Ranade, 1989, J. Clin. Pharmacol. 29:685).

[0739] Dosage regimens are adjusted to provide the optimum desired response (e.g., a therapeutic response). For example, a single bolus may be administered, several divided doses may be administered over time or the dose may be proportionally reduced or increased as indicated by the exigencies of the therapeutic situation. It is especially advantageous to formulate parenteral compositions in dosage unit form for ease of administration and uniformity of dosage. Dosage unit form as used herein refers to physically discrete units suited as unitary dosages for the subjects to be treated; each unit contains a predetermined quantity of active compound calculated to produce the desired therapeutic effect in association with the required pharmaceutical carrier. The specification for the dosage unit forms can be dictated by and directly dependent on (a) the unique characteristics of the active compound and the particular therapeutic effect to be achieved, and (b) the limitations inherent in the art of compounding such an active compound for the treatment of sensitivity in individuals.

[0740] An exemplary, non-limiting range for a therapeutically or prophylactically effective amount of a binding protein (e.g., an antibody) disclosed herein is 0.1-20 mg/kg, more preferably 1-10 mg/kg. An anti-plasma kallikrein antibody can be administered, e.g., by intravenous infusion, e.g., at a rate of less than 30, 20, 10, 5, or 1 mg/min to reach a dose of about 1 to 100 mg/m² or about 5 to 30 mg/m². For binding proteins smaller in molecular weight than an antibody, appropriate amounts can be proportionally less. Dosage values may vary with the type and severity of the condition to be alleviated. For a particular subject, specific dosage regimens can be adjusted over time according to the individual need and the professional judgment of the person administering or supervising the administration of the compositions.

[0741] The pharmaceutical compositions disclosed herein may include a “therapeutically effective amount” or a “prophylactically effective amount” of a plasma kallikrein binding protein disclosed herein. A “therapeutically effective amount” refers to an amount effective, at dosages and for periods of time necessary, to achieve the desired therapeutic result. A therapeutically effective amount of the composition may vary according to factors such as the disease state, age, sex, and weight of the individual, and the ability of the protein to elicit a desired response in the individual. A therapeutically effective amount is also one in which any toxic or detrimental effects of the composition are outweighed by the therapeutically beneficial effects.

[0742] A “therapeutically effective dosage” preferably modulates a measurable parameter, e.g., levels of circulating IgG antibodies by a statistically significant degree or at least about 20%, more preferably by at least about 40%, even more preferably by at least about 60%, and still more preferably by at least about 80% relative to untreated subjects. The ability of a compound to modulate a measurable parameter, e.g., a disease-associated parameter, can be evaluated in an animal model system predictive of efficacy in human disorders and conditions, e.g., a plasma kallikrein associated disease. Alternatively, this property of a composition can be evaluated by examining the ability of the compound to modulate a parameter in vitro.

[0743] A “prophylactically effective amount” refers to an amount effective, at dosages and for periods of time necessary, to achieve the desired prophylactic result. Typically, because a prophylactic dose is used in subjects prior to or at an earlier stage of disease, the prophylactically effective amount will be less than the therapeutically effective amount.

### Stabilization and Retention

[0744] In one embodiment, a plasma kallikrein binding protein is physically associated with a moiety that improves its stabilization and/or retention in circulation, e.g., in blood, serum, lymph, or other tissues, e.g., by at least 1.5, 2, 5, 10, or 50 fold. For example, a plasma kallikrein binding protein can be associated with a polymer, e.g., a substantially non-antigenic polymer, such as polyalkylene oxides or polyethylene oxides. Suitable polymers will vary substantially by weight. Polymers having molecular number average weights ranging from about 200 to about 35,000 (or about 1,000 to about 15,000, and 2,000 to about 12,500) can be used. For example, a plasma kallikrein binding protein can be conjugated to a water soluble polymer, e.g., hydrophilic polyvinyl polymers, e.g., polyvinylalcohol and polyvinylpyrrolidone. A non-limiting list of such polymers include polyalkylene oxide homopolymers such as polyethylene glycol (PEG) or polypropylene glycols, polyoxyethylenated polyols, copolymers thereof and block copolymers thereof, provided that the water solubility of the block copolymers is maintained.

[0745] A plasma kallikrein binding protein can also be associated with a carrier protein, e.g., a serum albumin, such as a human serum albumin (see e.g., Smith, B J. et al., 2001 Bioconjug Chem 12(5): 750-756). For example, a translational fusion can be used to associate the carrier protein with the plasma kallikrein binding protein.

[0746] A plasma kallikrein binding protein can also be modified as a HESylation derivative. Processes for HESylation of a plasma kallikrein binding protein utilize hydroxyethyl starch to modify the protein. HESylation of a protein can extend the circulating half-life of the protein and also reduce renal clearance.

[0747] In some embodiments, the plasma kallikrein binding proteins as described herein are fused to an unstructured recombinant polymer (URP) (see e.g., U.S. Pat. No. 7,846,445, the contents of which are incorporated herein by reference in its entirety). URPs are polypeptides composed of Gly, Ala, Ser, Thr, Glu, and Pro that have no secondary structure. In aqueous solvents, URPs are highly solvated and give the protein they are attached to an apparent molecular mass that is much larger than that of the polypeptide alone. A URP sequence can be fused to a plasma kallikrein binding protein to (i) increase circulating half-life, (ii) improve tissue selectivity, (iii) protect the binding protein from degradation, (iv) reduce immunogenicity, (v) interrupt T-cell epitopes, (vi) enhance solubility, (vii) improve pH profile and homogeneity of protein charge, (viii) improve purification properties due to a sharper pKa, (ix) improve formulation and delivery, and (x) improve protein production (see e.g., U.S. Pat. No. 7,846,445, which is incorporated herein by reference in its entirety).

[0748] In general, a URP sequence should be designed such that it lacks unintended activities such as interactions with serum proteins (e.g., antibodies). One of skill in the art can test a URP for unintended activities using e.g., an ELISA assay to detect the level of binding to an immobilized serum protein. In some embodiments, it may be desirable for a URP to interact with a serum protein (e.g., albumin) to increase the circulating half-life of the plasma kallikrein binding protein.

[0749] In general, it is desired that URP sequences behave like denatured peptide sequences under physiological conditions and as such, lack well defined secondary and tertiary structures under physiological conditions. Methods to ascertain the second and tertiary structures of a given polypeptide are known to those of skill in the art and include, but are not limited to, CD spectroscopy in the “far-UV” spectral region (190-250 nm), and computer programs or algorithms such as the Chou-Fasman algorithm (Chou, P. Y., et al. (1974) Biochemistry, 13:222-45). URP sequences typically have a high degree of conformational flexibility under physiological conditions (e.g., pH 6.5-7.8 and 30-37° C.) and also have large hydrodynamic radii (Stokes' radius) compared to globular proteins of similar molecular weight.

[0750] In one embodiment, the URP sequences have low immunogenicity. Preferred URPs are designed to avoid formation of conformational epitopes. For example, of particular interest are URP sequences having a low tendency to adapt compactly folded conformations in aqueous solution. In particular, low immunogenicity can be achieved by choosing sequences that resist antigen processing in antigen presenting cells, choosing sequences that do not bind MHC well and/or by choosing sequences that are derived from host (e.g., human) sequences.

[0751] In some embodiments, the URP sequences have a high degree of protease resistance to extend serum half-life. URPs can also be characterized by the effect they have on a protein sequence e.g., the protein exhibits a longer serum half-life and/or higher solubility as compared to the corresponding protein that is deficient in the URP. Methods of ascertaining serum half-life are known in the art (see e.g., Alvarez, P., et al. (2004) J Biol Chem, 279:3375-81). One can readily determine whether the resulting protein has a longer serum half-life as compared to the unmodified protein by practicing any methods available in the art or exemplified herein.

[0752] The URP can be of any length necessary to effect (a) extension of serum half-life of a protein comprising the URP; (b) an increase in solubility of the resulting protein; (c) an increased resistance to protease; and/or (d) a reduced immunogenicity of the resulting protein that comprises the URP. In some embodiments, the URP has about 30, 40, 50, 60, 70, 80, 90, 100, 150, 200, 300, 400 or more contiguous amino acids. When incorporated into a protein, the URP can be fragmented such that the resulting protein contains multiple URPs, or multiple fragments of URPs. Some or all of these individual URP sequences may be shorter than 40 amino acids, provided that the combined length of all URP sequences in the resulting protein is at least 40 amino acids. Preferably, the resulting protein has a combined length of URP sequences exceeding 40, 50, 60, 70, 80, 90, 100, 150, 200 or more amino acids.

[0753] In some embodiments, the isoelectric point (pI) of the URP is 1.0, 1.5, 2.0, 2.5, 3.0, 3.5, 4.0, 4.5, 5.0, 5.5, 6.0, 6.5, 7.0, 7.5, 8.0, 8.5, 9.0, 9.5, 10.0, 10.5, 11.0, 11.5, 12.0, 12.5 or even 13.0.

[0754] In general, URP sequences are rich in hydrophilic amino acids and contain a low percentage of hydrophobic or aromatic amino acids. Suitable hydrophilic residues include but are not limited to glycine, serine, aspartate, glutamate, lysine, arginine, and threonine. Hydrophobic residues that are less favored in construction of URPs include tryptophan, phenylalanine, tyrosine, leucine, isoleucine, valine, and methionine. URP sequences can be rich in glycine but URP sequences can also be rich in the amino acids glutamate, aspartate, serine, threonine, alanine or proline. Thus the predominant amino acid may be G, E, D, S, T, A or P. The inclusion of proline residues tends to reduce sensitivity to proteolytic degradation.

[0755] In some embodiments, the URP sequences include hydrophilic residues to increase their solubility in water and aqueous media under physiological conditions. The inclusion of hydrophilic residues reduces the formation of aggregates in aqueous formulations and the fusion of URP sequences to other proteins or peptides (e.g., a plasma kallikrein binding protein) can enhance their solubility and reduce aggregate formation and immunogenicity.

[0756] URP sequences can be further designed to avoid amino acids that confer undesirable properties to the protein, for example, cysteine (to avoid disulfide formation and oxidation), methionine (to avoid oxidation), asparagine and glutamine (to avoid desamidation).

[0757] In some embodiments, a URP is designed to be glycine-rich (e.g., 30%, 35%, 40%, 45%, 50%, 55%, 60%, 65%, 70%, 75%, 80%, 85%, 90%, 95%, or 100% of the total amino acids are glycine). Glycine-rich URPs are contemplated for use with the methods and compositions described herein since glycine-rich peptides have an increased conformational freedom (e.g., a characteristic of denatured peptides). The length of a glycine-rich sequence can vary between about 5 amino acids and 400 amino acids. For example, the length of a single, contiguous glycine-rich sequence can contain 5, 10, 15, 20, 25, 30, 35, 40, 45, 50, 55, 60, 70, 80, 90, 100, 120, 140, 160, 180, 200, 240, 280, 320 or 400 or more amino acids. A glycine-rich sequence may comprise glycine residues at both ends.

[0758] In some embodiments, a URP sequence is optimized to enhance the selectivity of the fusion protein for a particular tissue, cell-type or cell lineage. One can also utilize such URPs to direct the resulting protein to a specific subcellular location: extracellular matrix, nucleus, cytoplasm, cytoskeleton, plasma and/or intracellular membranous structures which include, but are not limited, to coated pits, Golgi apparatus, endoplasmic reticulum, endosome, lysosome, and mitochondria. A variety of these tissue-specific, cell-type specific, subcellular location specific sequences are known and available from numerous protein databases. Such selective URP sequences can be obtained by generating libraries of random or semi-random URP sequences, injecting them into animals or patients, and determining sequences with the desired tissue selectivity in tissue samples. Sequence determination can be performed by mass spectrometry. Using similar methods one can select URP sequences that facilitate oral, buccal, intestinal, nasal, thecal, peritoneal, pulmonary, rectal, or dermal uptake.

[0759] In one embodiment, a URP sequence is rich in positively charged amino acids such as arginine or lysine, which favors cellular uptake or transport through membranes. In some embodiments, URP sequences can be designed to contain one or more protease-sensitive sequences. Such URP sequences can be cleaved once the product of the invention has reached its target location. URP sequences can be designed to carry excess negative charges by introducing aspartic acid or glutamic acid residues. Of particular interest are URPs that contain greater than 5%, greater than 6%, 7%, 8%, 9%, 10%, 15%, 30% or more glutamic acid and less than 2% lysine or arginine. Such URPs carry an excess negative charge and as a result have a tendency to adopt open conformations due to electrostatic repulsion between individual negative charges of the peptide. Such an excess negative charge leads to an effective increase in their hydrodynamic radius and as a result it can lead to reduced kidney clearance of such molecules. Thus, one can modulate the effective net charge and hydrodynamic radius of a URP sequence by controlling the frequency and distribution of negatively charged amino acids in the URP sequences.

[0760] URPs can include a repetitive amino acid sequence of the format (Motif)x in which a sequence motif forms a direct repeat (ie ABCABCABCABC) or an inverted repeat (ABCCBAABCCBA) and the number of these repeats can be 2, 3, 4, 5, 6, 7, 8, 9, 10, 12, 14, 16, 18, 20, 22, 24, 26, 28, 30, 35, 40, 50 or more. URPs (or the repeats inside URPs) often contain only 1, 2, 3, 4, 5 or 6 different types of amino acids. URPs typically consist of repeats of human amino acid sequences that are 4, 5, 6, 7, 8, 9, 10, 11, 12, 13, 14, 15, 16, 17, 18, 19, 20, 22, 24, 26, 28, 30, 32, 34, 36 or more amino acids long, but URPs may also consist of non-human amino acid sequences that are 20, 22, 24, 26, 28, 30, 32, 34 36, 38 40, 42, 44, 46, 48, 50 amino acids long.

[0761] In one embodiment, URPs are derived from human sequences. The human genome contains many subsequences that are rich in one particular amino acid. Of particular interest are such amino acid sequences that are rich in a hydrophilic amino acid like serine, threonine, glutamate, aspartate, or glycine. Of particular interest are such subsequences that contain few hydrophobic amino acids and are predicted to be unstructured and highly soluble in an aqueous solution. Such human subsequences can be modified to further improve their utility. Exemplary human sequences for use in designing URPs are shown herein in Tables 24 and 25.

[0762] The use of sequences from human proteins is particularly desirable in design of URPs with reduced immunogenicity in a human subject. The URP sequence can be designed to eliminate T cell epitopes to reduce immunogenicity. For instance, one can synthesize a series of semi-random sequences with amino acid compositions that favor denatured, unstructured conformations and evaluate these sequences for the presence of human T cell epitopes and whether they are human sequences. Assays for human T cell epitopes have been described (Stickler, M., et al. (2003) J Immunol Methods, 281:95-108). One can incorporate human sequences into the design of URP sequences by oligomerizing or concatenating human sequences that have suitable amino acid compositions. These can be direct repeats or inverted repeats or mixtures of different repeats. In one embodiment, the entire URP sequence is from a human sequence.

[0763] Non-limiting examples of URPs containing repeating amino acids are: poly-glycine, poly-glutamic acid, poly-aspartic acid, poly-serine, poly-threonine, (GX) n where G is glycine and X is serine, aspartic acid, glutamic acid, threonine, or proline and n is at least 20, (GGX)n where X is serine, aspartic acid, glutamic acid, threonine, or proline and n is at least 13, (GGGX)n where X is serine, aspartic acid, glutamic acid, threonine, or proline and n is at least 10, (GGGGX)n where X is serine, aspartic acid, glutamic acid, threonine, or proline and n is at least 8, (GzX)n where X is serine, aspartic acid, glutamic acid, threonine, or proline, n is at least 15, and z is between 1 and 20.

[0764] The number of such repeats can be any number between 10 and 100. Products of the invention may contain URP sequences that are semi-random sequences. Examples are semi-random sequences containing at least 30, 40, 50, 60 or 70% glycine in which the glycines are well dispersed and in which the total concentration of tryptophan, phenylalanine, tyrosine, valine, leucine, and isoleucine is less than 70, 60, 50, 40, 30, 20, or 10% when combined. A preferred semi-random URP sequence contains at least 40% glycine and the total concentration of tryptophan, phenylalanine, tyrosine, valine, leucine, and isoleucine is less than 10%. A more preferred random URP sequence contains at least 50% glycine and the total concentration of tryptophan, phenylalanine, tyrosine, valine, leucine, and isoleucine is less than 5%. URP sequences can be designed by combining the sequences of two or more shorter URP sequences or fragments of URP sequences. Such a combination allows one to better modulate the pharmaceutical properties of the product containing the URP sequences and it allows one to reduce the repetitiveness of the DNA sequences encoding the URP sequences, which can improve expression and reduce recombination of the URP encoding sequences.

[0765] A URP sequence can be placed at the N terminus of either the light chain (LC) or heavy chain (HC) of a plasma kallikrein binding protein and a single URP can be attached to either HC or LC at either end. For example, one could combine the VH::CDR3::JH via a linker to VL::JL to make a scFv which could then be fused to a URP.

[0766] In one embodiment, a plasma kallikrein binding protein comprises a Fab fragment that inhibits plasma kallikrein and does not bind plasma prekallikrein wherein the LC is fused to a URP of 100 or more (e.g., 120, 140, 160, 180, 200, 300, 400 or more) amino acids and the HC is fused to a URP of 200 or more amino acids (e.g., 220, 240, 260, 280, 300, 350, 400, 450, 500, 600 or more). In one embodiment, the URP is fused to the carboxy terminus of LC and the carboxy terminus of HC. In one embodiment, the URPs have essentially equal amounts of Gly, Ala, Ser, Thr, Glu, and Pro residues. In one embodiment, the URP sequence does not comprise a hexamer repeat. In one embodiment, the plasma kallikrein binding protein (e.g., Fab fragment) is selected from the group consisting of M162-A04, M142-H08, X63-G06, X81-B01, X67-D03, X67-G04, and M160-G12.

[0767] In one embodiment, the HC::URP2 and LC::URP1 are produced in a yeast strain such as Pichia pastoris (BMC Biotechnol. 2009 Aug. 11; 9:70. PMID 19671134; J Biochem Mol Biol. 2005 May 31; 38(3): 294-9. PMID 15943904; Biotechnol Bioeng. 2006 Jun. 5; 94(2): 353-61. PMID 16570317), Saccharomyces cerevisiae (BMC Syst Biol. 2010 Oct. 22; 4:141. PMID 20969759; BMC Genomics. 2010 Mar. 26; 11:207. PMID 20346137), or Hansenula polymorpha (Appl Microbiol Biotechnol. 2001 July; 56(1-2): 157-64. PMID 11499924). One of skill in the art can utilize appropriate promoters and signal sequences for a particular strain of yeast desired for use in producing a fusion protein comprising a plasma kallikrein binding protein and a URP polypeptide.

[0768] In one embodiment, the HC::URP2 and LC::URP1 are produced in mammalian cells such as Chinese hamster ovary (CHO) cells. Signal sequences and promoters that are useful for protein production using CHO cells are known in the literature.

### Kits

[0769] A plasma kallikrein binding protein described herein can be provided in a kit, e.g., as a component of a kit. For example, the kit includes (a) a plasma kallikrein binding protein, e.g., a composition (e.g., a pharmaceutical composition) that includes a plasma kallikrein binding protein, and, optionally (b) informational material. The informational material can be descriptive, instructional, marketing or other material that relates to a method described herein and/or the use of a plasma kallikrein binding protein, e.g., for a method described herein.

[0770] The informational material of the kit is not limited in its form. In one embodiment, the informational material can include information about production of the compound, molecular weight of the compound, concentration, date of expiration, batch or production site information, and so forth. In one embodiment, the informational material relates to using the binding protein to treat, prevent, or diagnosis of disorders and conditions, e.g., a plasma kallikrein associated disease or condition.

[0771] In one embodiment, the informational material can include instructions to administer a plasma kallikrein binding protein in a suitable manner to perform the methods described herein, e.g., in a suitable dose, dosage form, or mode of administration (e.g., a dose, dosage form, or mode of administration described herein). In another embodiment, the informational material can include instructions to administer a plasma kallikrein binding protein to a suitable subject, e.g., a human, e.g., a human having, or at risk for, a disorder or condition described herein, e.g., a plasma kallikrein associated disease or condition. For example, the material can include instructions to administer a plasma kallikrein binding protein to a patient with a disorder or condition described herein, e.g., a plasma kallikrein associated disease. The informational material of the kits is not limited in its form. In many cases, the informational material, e.g., instructions, is provided in print but may also be in other formats, such as computer readable material.

[0772] A plasma kallikrein binding protein can be provided in any form, e.g., liquid, dried or lyophilized form. It is preferred that a plasma kallikrein binding protein be substantially pure and/or sterile. When a plasma kallikrein binding protein is provided in a liquid solution, the liquid solution preferably is an aqueous solution, with a sterile aqueous solution being preferred. When a plasma kallikrein binding protein is provided as a dried form, reconstitution generally is by the addition of a suitable solvent. The solvent, e.g., sterile water or buffer, can optionally be provided in the kit.

[0773] The kit can include one or more containers for the composition containing a plasma kallikrein binding protein. In some embodiments, the kit contains separate containers, dividers or compartments for the composition and informational material. For example, the composition can be contained in a bottle, vial, or syringe, and the informational material can be contained in association with the container. In other embodiments, the separate elements of the kit are contained within a single, undivided container. For example, the composition is contained in a bottle, vial or syringe that has attached thereto the informational material in the form of a label. In some embodiments, the kit includes a plurality (e.g., a pack) of individual containers, each containing one or more unit dosage forms (e.g., a dosage form described herein) of a plasma kallikrein binding protein. For example, the kit includes a plurality of syringes, ampules, foil packets, or blister packs, each containing a single unit dose of a plasma kallikrein binding protein. The containers of the kits can be air tight, waterproof (e.g., impermeable to changes in moisture or evaporation), and/or light-tight.

[0774] The kit optionally includes a device suitable for administration of the composition, e.g., a syringe, inhalant, dropper (e.g., eye dropper), swab (e.g., a cotton swab or wooden swab), or any such delivery device. In one embodiment, the device is an implantable device that dispenses metered doses of the binding protein. The disclosure also features a method of providing a kit, e.g., by combining components described herein.

### Treatments

[0775] Proteins that bind to plasma kallikrein, e.g., as described herein, have therapeutic and prophylactic utilities, particularly in human subjects. These binding proteins are administered to a subject to treat, prevent, and/or diagnose a variety of disorders and conditions, including e.g., a plasma kallikrein associated disease, or even to cells in culture, e.g., in vitro or ex vivo. For example, these binding proteins can be used to modify the effects of plasma kallikrein released from cells in culture (Lilla et al., J Biol Chem. 284 (20): 13792-13803 (2009)). Treating includes administering an amount effective to alleviate, relieve, alter, remedy, ameliorate, improve or affect the disorder, the symptoms of the disorder or the predisposition toward the disorder. The treatment may also delay onset, e.g., prevent onset, or prevent deterioration of a disease or condition.

[0776] As used herein, an amount of a target-binding agent effective to prevent a disorder, or a prophylactically effective amount of the binding agent refers to an amount of a target binding agent, e.g., an plasma kallikrein binding protein, e.g., an anti-plasma kallikrein antibody described herein, which is effective, upon single- or multiple-dose administration to the subject, for preventing or delaying the occurrence of the onset or recurrence of a disorder, e.g., a disorder described herein, e.g., a plasma kallikrein associated disease.

[0777] Methods of administering plasma kallikrein binding proteins and other agents are also described in “Pharmaceutical Compositions.” Suitable dosages of the molecules used can depend on the age and weight of the subject and the particular drug used. The binding proteins can be used as competitive agents to inhibit, reduce an undesirable interaction, e.g., between plasma kallikrein and its substrate (e.g., Factor XII or HMWK). The dose of the plasma kallikrein binding protein can be the amount sufficient to block 90%, 95%, 99%, or 99.9% of the activity of plasma kallikrein in the patient, especially at the site of disease. Depending on the disease, this may require 0.1, 1.0, 3.0, 6.0, or 10.0 mg/Kg. For an IgG having a molecular mass of 150,000 g/mole (two binding sites), these doses correspond to approximately 18 nM, 180 nM, 540 nM, 1.08 UM, and 1.8 UM of binding sites for a 5 L blood volume.

[0778] In one embodiment, the plasma kallikrein binding proteins are used to inhibit an activity (e.g., inhibit at least one activity of plasma kallikrein, e.g., reduce Factor XIIa and/or bradykinin production) of plasma kallikrein, e.g., in vivo. The binding proteins can be used by themselves or conjugated to an agent, e.g., a cytotoxic drug, cytotoxin enzyme, or radioisotope. This method includes: administering the binding protein alone or attached to an agent (e.g., a cytotoxic drug), to a subject requiring such treatment. For example, plasma kallikrein binding proteins that do not substantially inhibit plasma kallikrein may be used to deliver nanoparticles containing agents, such as toxins, to plasma kallikrein associated cells or tissues, e.g., to treat a plasma kallikrein-associate disorder.

[0779] Because the plasma kallikrein binding proteins recognize plasma kallikrein expressing cells and can bind to cells that are associated with (e.g., in proximity of or intermingled with) a plasma kallikrein associated disorder or condition, plasma kallikrein binding proteins can be used to inhibit an activity (e.g., inhibit at least one activity of plasma kallikrein, e.g., reduce Factor XIIa and/or bradykinin production) any such cells and inhibit the plasma kallikrein associated disease. Reducing plasma kallikrein activity can indirectly inhibit cells which may be dependent on the plasma kallikrein activity for the development and/or progression of a plasma kallikrein-associated disorder.

[0780] The binding proteins may be used to deliver an agent (e.g., any of a variety of cytotoxic and therapeutic drugs) to cells and tissues where plasma kallikrein is present. Exemplary agents include a compound emitting radiation, molecules of plants, fungal, or bacterial origin, biological proteins, and mixtures thereof. The cytotoxic drugs can be intracellularly acting cytotoxic drugs, such as toxins short range radiation emitters, e.g., short range, high energy α-emitters.

[0781] To target plasma kallikrein expressing cells, a prodrug system can be used. For example, a first binding protein is conjugated with a prodrug which is activated only when in close proximity with a prodrug activator. The prodrug activator is conjugated with a second binding protein, preferably one which binds to a non competing site on the target molecule. Whether two binding proteins bind to competing or non competing binding sites can be determined by conventional competitive binding assays. Exemplary drug prodrug pairs are described in Blakely et al., (1996) Cancer Research, 56:3287 3292.

[0782] The plasma kallikrein binding proteins can be used directly in vivo to eliminate antigen-expressing cells via natural complement-dependent cytotoxicity (CDC) or antibody dependent cellular cytotoxicity (ADCC). The binding proteins described herein can include complement binding effector domain, such as the Fc portions from IgG1, -2, or -3 or corresponding portions of IgM which bind complement. In one embodiment, a population of target cells is ex vivo treated with a binding agent described herein and appropriate effector cells. The treatment can be supplemented by the addition of complement or serum containing complement. Further, phagocytosis of target cells coated with a binding protein described herein can be improved by binding of complement proteins. In another embodiment target, cells coated with the binding protein which includes a complement binding effector domain are lysed by complement.

[0783] Methods of administering plasma kallikrein binding proteins are described in “Pharmaceutical Compositions.” Suitable dosages of the molecules used will depend on the age and weight of the subject and the particular drug used. The binding proteins can be used as competitive agents to inhibit or reduce an undesirable interaction, e.g., between a natural or pathological agent and the plasma kallikrein.

[0784] The plasma kallikrein binding protein can be used to deliver macro and micromolecules, e.g., a gene into the cell for gene therapy purposes into the endothelium or epithelium and target only those tissues expressing the plasma kallikrein. The binding proteins may be used to deliver a variety of cytotoxic drugs including therapeutic drugs, a compound emitting radiation, molecules of plants, fungal, or bacterial origin, biological proteins, and mixtures thereof. The cytotoxic drugs can be intracellularly acting cytotoxic drugs, such as short range radiation emitters, including, for example, short range, high energy α emitters, as described herein.

[0785] In the case of polypeptide toxins, recombinant nucleic acid techniques can be used to construct a nucleic acid that encodes the binding protein (e.g., antibody or antigen-binding fragment thereof) and the cytotoxin (or a polypeptide component thereof) as translational fusions. The recombinant nucleic acid is then expressed, e.g., in cells and the encoded fusion polypeptide isolated.

[0786] Alternatively, the plasma kallikrein binding protein can be coupled to high energy radiation emitters, for example, a radioisotope, such as ¹³¹I, a γ-emitter, which, when localized at a site, results in a killing of several cell diameters. See, e.g., S. E. Order, “Analysis, Results, and Future Prospective of the Therapeutic Use of Radiolabeled Antibody in Cancer Therapy”, Monoclonal Antibodies for Cancer Detection and Therapy, R. W. Baldwin et al. (eds.), pp 303 316 (Academic Press 1985). Other suitable radioisotopes include a emitters, such as ²¹²Bi, ²¹³Bi, and ²¹¹At, and b emitters, such as ¹⁸⁶Re and ⁹⁰Y. Moreover, ¹⁷⁷Lu may also be used as both an imaging and cytotoxic agent.

[0787] Radioimmunotherapy (RIT) using antibodies labeled with ¹³¹I, ⁹⁰Y, and ¹⁷⁷Lu is under intense clinical investigation. There are significant differences in the physical characteristics of these three nuclides and as a result, the choice of radionuclide is very critical in order to deliver maximum radiation dose to a tissue of interest. The higher beta energy particles of ⁹⁰Y may be good for bulky tumors. The relatively low energy beta particles of ¹³¹I are ideal, but in vivo dehalogenation of radioiodinated molecules is a major disadvantage for internalizing antibody. In contrast, ¹⁷⁷Lu has low energy beta particle with only 0.2-0.3 mm range and delivers much lower radiation dose to bone marrow compared to ⁹⁰Y. In addition, due to longer physical half-life (compared to ⁹⁰Y), the residence times are higher. As a result, higher activities (more mCi amounts) of ¹⁷⁷Lu labeled agents can be administered with comparatively less radiation dose to marrow. There have been several clinical studies investigating the use of ¹⁷⁷Lu labeled antibodies in the treatment of various cancers. (Mulligan T et al., 1995, Clin. Canc. Res. 1:1447-1454; Meredith R F, et al., 1996, J. Nucl. Med. 37:1491-1496; Alvarez R D, et al., 1997, Gynecol. Oncol. 65:94-101).

### Exemplary Diseases and Conditions

[0788] A plasma kallikrein binding protein described herein is useful to treat (or prevent) a disease or condition in which plasma kallikrein activity is implicated, e.g., a disease or condition described herein, or to treat (or prevent) one or more symptoms associated therewith. In some embodiments, the plasma kallikrein binding protein (e.g., plasma kallikrein binding IgG or Fab) inhibits plasma kallikrein activity.

[0789] Examples of such diseases and conditions which can be treated (or prevented) by a plasma kallikrein binding protein described herein include: rheumatoid arthritis, gout, intestinal bowel disease, oral mucositis, neuropathic pain, inflammatory pain, spinal stenosis-degenerative spine disease, arterial or venous thrombosis, post operative ileus, aortic aneurysm, osteoarthritis, vasculitis, edema, hereditary angioedema, cerebral edema, pulmonary embolism, stroke, clotting induced by ventricular assistance devices or stents, head trauma or peri-tumor brain edema, sepsis, acute middle cerebral artery (MCA) ischemic event (stroke), restenosis (e.g., after angioplasty), systemic lupus erythematosis nephritis, and burn injury. A plasma kallikrein binding protein described herein can also be used to promote wound healing. A plasma kallikrein binding protein described herein can also be used as an oncology treatment by mechanisms that include, but are not limited to, blocking production of pro-angiogenic bradykinin.

[0790] A therapeutically effective amount of a plasma kallikrein binding protein can be administered to a subject having or suspected of having a disorder in which plasma kallikrein activity is implicated, thereby treating (e.g., ameliorating or improving a symptom or feature of a disorder, slowing, stabilizing and/or halting disease progression) the disorder.

[0791] The plasma kallikrein binding protein can be administered in a therapeutically effective amount. A therapeutically effective amount of a plasma kallikrein binding protein is the amount which is effective, upon single or multiple dose administration to a subject, in treating a subject, e.g., curing, alleviating, relieving or improving at least one symptom of a disorder in a subject to a degree beyond that expected in the absence of such treatment. A therapeutically effective amount of the composition may vary according to factors such as the disease state, age, sex, and weight of the individual, and the ability of the compound to elicit a desired response in the individual. A therapeutically effective amount is also one in which any toxic or detrimental effects of the composition are outweighed by the therapeutically beneficial effects. A therapeutically effective dosage preferably modulates a measurable parameter, favorably, relative to untreated subjects. The ability of a compound to affect (e.g., inhibit) a measurable parameter can be evaluated in an animal model system predictive of efficacy in a human disorder.

[0792] Dosage regimens can be adjusted to provide the optimum desired response (e.g., a therapeutic response). For example, a single bolus may be administered, several divided doses may be administered over time or the dose may be proportionally reduced or increased as indicated by the exigencies of the therapeutic situation. It is especially advantageous to formulate parenteral compositions in dosage unit form for ease of administration and uniformity of dosage. Dosage unit form as used herein refers to physically discrete units suited as unitary dosages for the subjects to be treated; each unit contains a predetermined quantity of active compound calculated to produce the desired therapeutic effect in association with the required pharmaceutical carrier.

### Rheumatoid Arthritis

[0793] Rheumatoid arthritis (RA) is an autoimmune, chronic inflammatory disease that causes joint swelling and pain and normally results in joint destruction. RA generally follows a relapsing/remitting course, with “flares” of disease activity interspersed with remissions of disease symptoms. RA is associated with a number of additional inflammatory disorders, including Sjogren's syndrome (dry eyes and mouth caused by inflammation of tear and saliva glands), pleuritis (inflammation of the pleura that causes pain upon deep breath and coughing), rheumatoid nodules (nodular sites of inflammation that develop within the lungs), pericarditis (inflammation of the pericardium that causes pain when lying down or leaning forward), Felty syndrome (splenomegaly and leucopenia observed in conjunction with RA, making the subject prone to infection), and vasculitis (an inflammation of the blood vessels which can block blood flow). Plasma kallikrein has been implicated in rheumatoid arthritis.

[0794] Symptoms of active RA include fatigue, lack of appetite, low grade fever, muscle and joint aches, and stiffness. Muscle and joint stiffness are usually most notable in the morning and after periods of inactivity. During flares, joints frequently become red, swollen, painful, and tender, generally as a consequence of synovitis.

[0795] Treatment for rheumatoid arthritis involves a combination of medications, rest, joint strengthening exercises, and joint protection. Two classes of medications are used in treating rheumatoid arthritis: anti-inflammatory “first-line drugs,” and “Disease-Modifying Antirheumatic Drugs” (DMARDs). The first-line drugs include NSAIDS (e.g., aspirin, naproxen, ibuprofen, and etodolac) and cortisone (corticosteroids). DMARDs, such as gold (e.g., gold salts, gold thioglucose, gold thiomalate, oral gold), methotrexate, sulfasalazine, D-penicillamine, azathioprine, cyclophosphamide, chlorambucil, and cyclosporine, leflunomide, etanercept, infliximab, anakinra, and adalimumab, and hydroxychloroquine, promote disease remission and prevent progressive joint destruction, but they are not anti-inflammatory agents.

[0796] The disclosure provides methods of treating (e.g., ameliorating, stabilizing, or eliminating one or more symptoms or ameliorating or stabilizing the subject's score on a RA scale) rheumatoid arthritis by administering a plasma kallikrein binding protein (e.g., a therapeutically effective amount of a plasma kallikrein binding protein) to a subject having or suspected of having RA. Additionally provided are methods of treating RA by administering a plasma kallikrein binding protein (e.g., a therapeutically effective amount of a plasma kallikrein binding protein) in combination with a second therapy, e.g., with at least one anti-inflammatory “first line drug” (e.g., an NSAID and/or cortisone) and/or a DMARD. The disclosure also provides methods of preventing rheumatoid arthritis or a symptom thereof by administering a plasma kallikrein binding protein (e.g., a prophylactically effective amount of a plasma kallikrein binding protein) to a subject at risk of developing RA (e.g., a subject having a family member with RA or a genetic predisposition thereto).

[0797] Further provided are methods of treating (e.g., ameliorating, stabilizing, or eliminating one or more symptoms) rheumatoid arthritis associated disorders (Sjogren's syndrome, pleuritis, pulmonary rheumatoid nodules, pericarditis, Felty syndrome, and vasculitis) by administering a plasma kallikrein binding protein (e.g., a therapeutically effective amount of a plasma kallikrein binding protein) to a subject having or suspected of having RA.

[0798] Scales useful for assessing RA and symptoms of RA include, e.g., the Rheumatoid Arthritis Severity Scale (RASS; Bardwell et al., (2002) Rheumatology 41(1): 38-45), SF-36 Arthritis Specific Health Index (ASHI; Ware et al., (1999) Med. Care. 37 (5 Suppl): MS40-50), Arthritis Impact Measurement Scales or Arthritis Impact Measurement Scales 2 (AIMS or AIMS2; Meenan et al. (1992) Arthritis Rheum. 35(1): 1-10); the Stanford Health Assessment Questionnaire (HAQ), HAQII, or modified HAQ (see, e.g., Pincus et al. (1983) Arthritis Rheum. 26 (11): 1346-53).

[0799] Guidance for the determination of the dosage that delivers a therapeutically effective amount of a plasma kallikrein binding protein may be obtained from animal models of rheumatoid arthritis, such as collagen-induced arthritis (CIA), which is induced, typically in rodents, by immunization with autologous or heterologous type II collagen in adjuvant (Williams et al. Methods Mol Med. 98:207-16 (2004)).

### Gout

[0800] Gout is a condition that results from crystals of uric acid depositing in tissues of the body. Gout is characterized by an overload of uric acid in the body and recurring attacks of joint inflammation (arthritis). Chronic gout can lead to deposits of hard lumps of uric acid in and around the joints, decreased kidney function, and kidney stones. Gout is often related to an inherited abnormality in the body's ability to process uric acid. Uric acid is a breakdown product of purines, which are part of many foods. An abnormality in handling uric acid can cause attacks of painful arthritis (gout attack), kidney stones, and blockage of the kidney filtering tubules with uric acid crystals, leading to kidney failure. Some patients may only develop elevated blood uric acid levels (hyperuricemia) without having arthritis or kidney problems.

[0801] Symptoms of gout include, e.g., excruciating and unexpected pain, swelling, redness, warmth and stiffness in the affected foot or other parts of the body, and low-grade fever.

[0802] Treatments for gout include, e.g., nonsteroidal anti-inflammatory drugs (NSAIDs), colchicine and oral glucocorticoids, intra-articular glucocorticoids administered via a joint injection, xanthine oxidase inhibitors (e.g., allopurinol, febuxostat), uricosurics (e.g., probenecid, EDTA), urate oxidases (e.g., pegloticase), sodium bicarbonate, and low purine diet.

[0803] The disclosure provides methods of treating (e.g., ameliorating, stabilizing, or eliminating one or more symptoms or the worsening of) gout by administering a plasma kallikrein binding protein (e.g., a therapeutically effective amount of a plasma kallikrein binding protein) to a subject having or suspected of having gout. Additionally provided are methods of treating gout by administering a plasma kallikrein binding protein (e.g., a therapeutically effective amount of a kallikrein binding protein) in combination with a second therapy, e.g., an NSAID, a colchicine, an oral glucocorticoid, an intra-articular glucocorticoid administered via a joint injection, a xanthine oxidase inhibitor (e.g., allopurinol, febuxostat), a uricosuric (e.g., probenecid, EDTA), a urate oxidase (e.g., pegloticase), sodium bicarbonate, and/or low purine diet. The disclosure also provides methods of preventing gout or a symptom thereof by administering a plasma kallikrein binding protein (e.g., a prophylactically effective amount of a plasma kallikrein binding protein) to a subject at risk of developing gout (e.g., a subject having a family member with gout or a genetic predisposition thereto).

[0804] Guidance for the determination of the dosage that delivers a therapeutically effective amount of a plasma kallikrein binding protein may be obtained from animal models of gout, see, e.g., Reginato and Olsen, Curr Opin Rheumatol. 19 (2): 134-45 (2007) and references cited therein.

### Intestinal Bowel Disease (IBD)

[0805] Inflammatory bowel disease (IBD) is a group of inflammatory conditions of the large intestine and, in some cases, the small intestine. The main forms of IBD are Crohn's disease and ulcerative colitis (UC). Accounting for far fewer cases are other forms of IBD: collagenous colitis, lymphocytic colitis, ischaemic colitis, diversion colitis, Behçet's syndrome, infective colitis, and indeterminate colitis. The main difference between Crohn's disease and UC is the location and nature of the inflammatory changes. Crohn's can affect any part of the gastrointestinal tract, from mouth to anus (skip lesions), although a majority of the cases start in the terminal ileum. Ulcerative colitis, in contrast, is restricted to the colon and the rectum. Microscopically, ulcerative colitis is restricted to the mucosa (epithelial lining of the gut), while Crohn's disease affects the whole bowel wall. Finally, Crohn's disease and ulcerative colitis present with extra-intestinal manifestations (such as liver problems, arthritis, skin manifestations and eye problems) in different proportions.

[0806] Symptoms of IBD include abdominal pain, vomiting, diarrhea, hematochezia, weight loss, weight gain and various associated complaints or diseases (arthritis, pyoderma gangrenosum, primary sclerosing cholangitis). Diagnosis is generally by colonoscopy with biopsy of pathological lesions. Rarely, a definitive diagnosis of neither Crohn's disease nor ulcerative colitis can be made because of idiosyncrases in the presentation. In this case, a diagnosis of indeterminate colitis may be made.

[0807] Treatment for IBD, depending on the level of severity, may require immunosuppression to control the symptoms. Immunosuppresives such as azathioprine, methotrexate, or 6-mercaptopurine can be used. More commonly, treatment of IBD requires a form of mesalamine. Often, steroids are used to control disease flares and were once acceptable as a maintenance drug. Biologicals, such as infliximab, have been used to treat patients with Crohn's disease or Ulcerative Colitis. Severe cases may require surgery, such as bowel resection, strictureplasty or a temporary or permanent colostomy or ileostomy. Alternative medicine treatments for IBD exist in various forms however such methods concentrate on controlling underlying pathology in order to avoid prolonged steroidal exposure or surgical excision. Usually the treatment is started by administering drugs, such as prednisone, with high anti-inflammatory affects. Once the inflammation is successfully controlled, the patient is usually switched to a lighter drug, such as asacol—a mesalamine—to keep the disease in remission. If unsuccessful, a combination of the aforementioned immunosuppressant drugs with a mesalamine (which may also have an anti-inflammatory effect) may or may not be administered, depending on the patient.

[0808] The disclosure provides methods of treating (e.g., ameliorating, stabilizing, or eliminating one or more symptoms of) IBD by administering a plasma kallikrein binding protein (e.g., a therapeutically effective amount of a plasma kallikrein binding protein) to a subject having or suspected of having IBD. Additionally provided are methods of treating IBD by administering a plasma kallikrein binding protein (e.g., a therapeutically effective amount of a kallikrein binding protein) in combination with a second therapy, e.g., an immunosuppressive (e.g., azathioprine, methotrexate, 6-mercaptopurine), a mesalamine, a steroid, and/or infliximab. The disclosure also provides methods of preventing IBD or a symptom thereof by administering a plasma kallikrein binding protein (e.g., a prophylactically effective amount of a plasma kallikrein binding protein) to a subject at risk of developing IBD (e.g., a subject having a family member with IBD or a genetic predisposition thereto).

[0809] Guidance for the determination of the dosage that delivers a therapeutically effective amount of a plasma kallikrein binding protein may be obtained from animal models of IBD, see, e.g., those described in U.S. Pat. No. 6,114,382, WO 2004/071186, and references cited therein.

### Oral Mucositis

[0810] Oral mucositis is the painful inflammation and ulceration of the mucous membranes in the mouth, usually as an adverse effect of chemotherapy and radiotherapy treatment for cancer.

[0811] Symptoms of oral mucositis include, e.g., ulcers, peripheral erythema, burning sensation accompanied by reddening, trouble speaking, eating, or even opening the mouth, and dyseusia (alteration in taste perception).

[0812] Treatment for oral mucositis includes oral hygiene (salt mouthwash, GELCLAIR®, CAPHOSOL®, MUGARD®), palifermin (a human keratinocyte growth factor), cytokines and other modifiers of inflammation (e.g., IL-1, IL-11, TGF-beta3), amino acid supplementation (e.g., glutamine), vitamins, colony-stimulating factors, cryotherapy, and laser therapy.

[0813] The disclosure provides methods of treating (e.g., ameliorating, reducing, or eliminating one or more symptoms, or stabilizing the subject's score on a mucositis scale) oral mucositis by administering a plasma kallikrein binding protein (e.g., a therapeutically effective amount of a plasma kallikrein binding protein) to a subject having or suspected of having oral mucositis. Additionally provided are methods of treating oral mucositis by administering a plasma kallikrein binding protein (e.g., a therapeutically effective amount of a plasma kallikrein binding protein) in combination with a second therapy, e.g., oral hygiene (salt mouthwash, GELCLAIR®, CAPHOSOL®, MUGARD®), palifermin (a human keratinocyte growth factor), a cytokine and/or a modifier of inflammation (e.g., IL-1, IL-11, TGF-beta3), an amino acid supplementation (e.g., glutamine), a vitamin, a colony-stimulating factor, cryotherapy, and/or laser therapy. The disclosure also provides methods of preventing oral mucositis or a symptom thereof by administering a plasma kallikrein binding protein (e.g., a prophylactically effective amount of a plasma kallikrein binding protein) to a subject at risk of developing oral mucositis (e.g., a subject that has undergone or is undergoing chemotherapy or radiotherapy).

[0814] Scales useful for assessing oral mucositis include the World Health Organization (WHO) Oral Toxicity score (Handbook for reporting results of cancer treatment. Geneva, Switzerland: World Health Organization; 1979:15-22), National Cancer Institute Common Toxicity Criteria (NCI-CTC) for Oral Mucositis (National Cancer Institute Common Toxicity Criteria. Version 2.0, Jun. 1, 1999, Sonis et al., Cancer. 85:2103-2113 (1999)), and Oral Mucositis Assessment Scale (OMAS).

[0815] Guidance for the determination of the dosage that delivers a therapeutically effective amount of a plasma kallikrein binding protein may be obtained from animal models of oral mucositis, such as an animal model of oral mucositis induced by conditioning regimen of haematopoietic stem cell transplantation (Chen et al., Zhonghua Kou Qiang Yi Xue Za Zhi. 42 (11): 672-6 (2007)).

### Neuropathic Pain

[0816] Neuropathic pain is a complex, chronic pain state that usually is accompanied by tissue injury. With neuropathic pain, the nerve fibers themselves may be damaged, dysfunctional or injured. These damaged nerve fibers send incorrect signals to other pain centers. The impact of nerve fiber injury includes a change in nerve function both at the site of injury and areas around the injury.

[0817] Symptoms of neuropathic pain include, e.g., shooting and burning pain and tingling and numbness.

[0818] Treatments for neuropathic pain include, e.g., medications (e.g., non-steroidal anti-inflammatory drugs (NSAIDs) (e.g., ALEVE®, MOTRIN®, or morphine), anticonvulsant, and antidepressant drugs), and invasive or implantable devices (e.g., electrical stimulation).

[0819] The disclosure provides methods of treating (e.g., ameliorating, reducing, or eliminating one or more symptoms of or stabilizing the subject's score on a pain scale) neuropathic pain by administering a plasma kallikrein binding protein (e.g., a therapeutically effective amount of a plasma kallikrein binding protein) to a subject having or suspected of having neuropathic pain. Additionally provided are methods of treating neuropathic pain by administering a plasma kallikrein binding protein (e.g., a therapeutically effective amount of a plasma kallikrein binding protein) in combination with a second therapy, e.g., a nonsurgical treatment ((e.g., a non-steroidal anti-inflammatory drug (NSAID) (e.g., ALEVE®, MOTRIN®, or morphine), an anticonvulsant, and/or an antidepressant drug), and/or an invasive or implantable device (e.g., electrical stimulation). The disclosure also provides methods of preventing neuropathic pain or a symptom thereof by administering a plasma kallikrein binding protein (e.g., a prophylactically effective amount of a plasma kallikrein binding protein) to a subject at risk of developing neuropathic pain (e.g., a subject that has experienced tissue injury).

[0820] Scales useful for the assessment of neuropathic pain include, e.g., Wong-Baker FACES Pain Rating Scale (Wong-Baker FACES Pain Rating Scale Foundation), Visual analog scale (VAS) (Huskisson, J. Rheumatol. 9(5): 768-9 (1982)), McGill Pain Questionnaire (MPQ) (Melzack, Pain 1(3): 277-99 (1975)), Descriptor differential scale (DDS) (Gracely and Kwilosz, Pain 35(3): 279-88 (1988)), Faces Pain Scale-Revised (FPS-R) (Hicks et al., Pain 93(2): 173-83 (2001)), Numerical 11 point box (BS-11) (Jensen et al., Clin J Pain 5(2): 153-9 (1989)), Numeric Rating Scale (NRS-11) (Hartrick et al., Pain Pract 3(4): 310-6 (2003)), Dolorimeter Pain Index (DPI) (Hardy et al., (1952). Pain Sensations and Reactions. Baltimore: The Williams & Wilkins Co.), and Brief Pain Inventory (BPI) (Cleeland and Ryan Ann. Acad. Med. Singap. 23 (2): 129-38 (1994)).

[0821] Guidance for the determination of the dosage that delivers a therapeutically effective amount of a plasma kallikrein binding protein may be obtained from animal models of neuropathic pain, see, e.g., those described in Martin et al., Methods Mol Med. 84:233-42 (2003) and references cited therein.

### Inflammatory Pain

[0822] Inflammatory pain is caused by an insult such as penetration wounds, burns, extreme cold, fractures, arthritis, autoimmune conditions, excessive stretching, infections and vasoconstriction to the integrity of tissues at a cellular level. During inflammation a complex neuro-immune interaction results in primary hyperalgesia, in which a large range of inflammatory molecules including prostaglandins and bradykinin induce and maintain the altered nociceptor sensitivity.

[0823] Treatments for inflammatory pain include, e.g., non-steroidal anti-inflammatory drugs (NSAIDs) and corticosteroids.

[0824] The disclosure provides methods of treating (e.g., ameliorating, reducing, or eliminating one or more symptoms of) inflammatory pain by administering a plasma kallikrein binding protein (e.g., a therapeutically effective amount of a plasma kallikrein binding protein) to a subject having or suspected of having inflammatory pain. Additionally provided are methods of treating inflammatory pain by administering a plasma kallikrein binding protein (e.g., a therapeutically effective amount of a plasma kallikrein binding protein) in combination with a second therapy, e.g., a non-steroidal anti-inflammatory drug (NSAID) and/or a corticosteroid. The disclosure also provides methods of preventing inflammatory pain or a symptom thereof by administering a plasma kallikrein binding protein (e.g., a prophylactically effective amount of a plasma kallikrein binding protein) to a subject at risk of developing inflammatory pain (e.g., a subject that has experienced an insult, e.g., such as a penetration wound, a burn, extreme cold, a fracture, arthritis, an autoimmune condition, excessive stretching, or infection).

[0825] Scales useful for the assessment of inflammatory pain include, e.g., Wong-Baker FACES Pain Rating Scale (Wong-Baker FACES Pain Rating Scale Foundation), Visual analog scale (VAS) (Huskisson, J. Rheumatol. 9 (5): 768-9 (1982)), McGill Pain Questionnaire (MPQ) (Melzack, Pain 1 (3): 277-99 (1975)), Descriptor differential scale (DDS) (Gracely and Kwilosz, Pain 35 (3): 279-88 (1988)), Faces Pain Scale-Revised (FPS-R) (Hicks et al., Pain 93 (2): 173-83 (2001)), Numerical 11 point box (BS-11) (Jensen et al., Clin J Pain 5 (2): 153-9 (1989)), Numeric Rating Scale (NRS-11) (Hartrick et al., Pain Pract 3 (4): 310-6 (2003)), Dolorimeter Pain Index (DPI) (Hardy et al., (1952). Pain Sensations and Reactions. Baltimore: The Williams & Wilkins Co.), and Brief Pain Inventory (BPI) (Cleeland and Ryan Ann. Acad. Med. Singap. 23 (2): 129-38 (1994)).

[0826] Guidance for the determination of the dosage that delivers a therapeutically effective amount of a plasma kallikrein binding protein may be obtained from animal models of inflammatory pain such as an animal model of chronic inflammatory pain (Wilson et al., Eur J Pain. 10 (6): 537-49 (2006)) and an inflammatory model of pain and hyperalgesia (Ren and Dubner, ILAR J. 40 (3): 111-118 (1999)).

### Spinal Stenosis

[0827] Spinal stenosis is a medical condition in which the spinal canal narrows and compresses the spinal cord and nerves. This is usually due to the common occurrence of spinal degeneration that occurs with aging. It can also sometimes be caused by spinal disc herniation, osteoporosis or a tumor. Spinal stenosis may affect the cervical, thoracic or lumbar spine. In some cases, it may be present in all three places in the same patient.

[0828] Symptoms of spinal stenosis include, e.g., pain or cramping in the legs, radiating back and hip pain, pain in the neck and shoulders, loss of balance, and loss of bowel or bladder function (cauda equina syndrome).

[0829] Treatments for spinal stenosis include, e.g., nonsurgical treatments (e.g., physical therapy, non-steroidal anti-inflammatory drugs (NSAIDs) (e.g., aspirin, ibuprofen and indomethacin), analgesics (e.g., acetaminophen), chondroitin sulfate, glucosamine, rest or restricted activity, back brace or corset, epidural steroid injections (e.g., corticosteroid)), and surgery (e.g., decompressive laminectomy, laminotomy and fusion).

[0830] The disclosure provides methods of treating (e.g., ameliorating, reducing, or eliminating one or more symptoms of) spinal stenosis by administering a plasma kallikrein binding protein (e.g., a therapeutically effective amount of a plasma kallikrein binding protein) to a subject having or suspected of having spinal stenosis. Additionally provided are methods of treating spinal stenosis by administering a plasma kallikrein binding protein (e.g., a therapeutically effective amount of a plasma kallikrein binding protein) in combination with a second therapy, e.g., a nonsurgical treatment (e.g., physical therapy and/or a nonsteroidal anti-inflammatory drug (NSAID) (e.g., aspirin, ibuprofen or indomethacin), an analgesic (e.g., acetaminophen), chondroitin sulfate, glucosamine, rest or restricted activity, a back brace or corset, an epidural steroid injection (e.g., corticosteroid), and/or surgery (e.g., decompressive laminectomy, laminotomy and/or fusion). The disclosure also provides methods of preventing spinal stenosis or a symptom thereof by administering a plasma kallikrein binding protein (e.g., a prophylactically effective amount of a plasma kallikrein binding protein) to a subject at risk of developing spinal stenosis (e.g., a subject that has spinal degeneration).

[0831] Guidance for the determination of the dosage that delivers a therapeutically effective amount of a plasma kallikrein binding protein may be obtained from animal models of spinal stenosis, such as a model of lumbar spinal stenosis (Sekiguchi et al., Spine 29, 1105-1111 (2004)).

### Arterial and Venous Thrombosis

[0832] Arterial thrombosis is the formation of a thrombus within an artery. In most cases, arterial thrombosis follows rupture of atheroma, and is therefore referred to as atherothrombosis.

[0833] Arterial thrombosis is associated with a number of disorders, including stroke and myocardial infarction. In thrombotic stroke, a thrombus (blood clot) usually forms around atherosclerotic plaques. Since blockage of the artery is gradual, onset of symptomatic thrombotic strokes is slower. Thrombotic stroke can be divided into two categories-large vessel disease and small vessel disease. The former affects vessels such as the internal carotids, vertebral and the circle of Willis. The latter can affect smaller vessels such as the branches of the circle of Willis. Myocardial infarction (MI) is caused by an infarct (death of tissue due to ischemia), often due to the obstruction of the coronary artery by a thrombus. MI can quickly become fatal if emergency medical treatment is not received promptly.

[0834] Venous thrombosis is a blood clot that forms within a vein. If a piece of a blood clot formed in a vein breaks off, it can be transported to the right side of the heart, and from there into the lungs. A piece of thrombus that is transported in this way is an embolism and the process of forming a thrombus that becomes embolic is called a thromboembolism. An embolism that lodges in the lungs is a pulmonary embolism (PE). A pulmonary embolus is a very serious condition that can be fatal if not recognized and treated promptly.

[0835] Superficial venous thromboses can cause discomfort but generally do not cause serious consequences, unlike the deep venous thromboses (DVTs) that form in the deep veins of the legs or in the pelvic veins. Systemic embolisms of venous origin can occur in patients with an atrial or ventricular septal defect, through which an embolus may pass into the arterial system. Such an event is termed a paradoxical embolism.

[0836] Prevention of arterial and/or venous thrombosis includes medications (e.g., anticoagulants (e.g., heparin), aspirin, and vitamin E) and mechanical methods (e.g., mechanical leg pumps (pneumatic compression stockings)).

[0837] The disclosure provides methods of treating (e.g., ameliorating, reducing, or eliminating one or more symptoms of) arterial and/or venous thrombosis by administering a plasma kallikrein binding protein (e.g., a therapeutically effective amount of a plasma kallikrein binding protein) to a subject having or suspected of having arterial and/or venous thrombosis. Additionally provided are methods of treating arterial and/or venous thrombosis by administering a plasma kallikrein binding protein (e.g., a therapeutically effective amount of a plasma kallikrein binding protein) in combination with a second therapy, e.g., an anticoagulant (e.g., heparin), aspirin, and/or vitamin E and/or a mechanical method (e.g., a mechanical leg pump (pneumatic compression stockings). The disclosure also provides methods of preventing arterial and/or venous thrombosis or a symptom thereof by administering a plasma kallikrein binding protein (e.g., a prophylactically effective amount of a plasma kallikrein binding protein) to a subject at risk of developing arterial and/or venous thrombosis (e.g., a subject that has experienced a stroke or myocardial infarction).

[0838] Guidance for the determination of the dosage that delivers a therapeutically effective amount of a plasma kallikrein binding protein may be obtained from animal models of arterial or venous thrombosis, such as a double-tuck model of arterial thrombosis (Gomez-Jorge et al., J. Vasc. Inter. Rad. 9 (4): 633-638 (1998), a model of venous thrombosis in rat with low flow conditions in the venous blood stream (Fredrich et al., Blood Coagul Fibrinolysis. 5 (2): 243-8 (1994)), and a canine model for venous thrombosis and spontaneous pulmonary embolism (Frisbiel, Spinal Cord 43, 635-639 (2005)).

### Postoperative Ileus

[0839] Postoperative ileus is a temporary paralysis of a portion of the intestines typically after an abdominal surgery. Postoperative ileus commonly occurs for 24 to 72 hours after abdominal surgery.

[0840] Symptoms of postoperative ileus include, e.g., moderate and diffuse abdominal discomfort, constipation, abdominal distension, nausea or vomiting, lack of bowel movement and/or flatulence, and excessive belching.

[0841] Treatments for postoperative ileus include, e.g., nil per os (NPO or “Nothing by Mouth”) until peristaltic sound is heard from auscultation of the area where this portion lies, nasogastric suction, parenteral feeds, and medications (e.g., lactulose and erythromycin).

[0842] The disclosure provides methods of treating (e.g., ameliorating, reducing, or eliminating one or more symptoms of) postoperative ileus by administering a plasma kallikrein binding protein (e.g., a therapeutically effective amount of a plasma kallikrein binding protein) to a subject having or suspected of having postoperative ileus. Additionally provided are methods of treating postoperative ileus by administering a plasma kallikrein binding protein (e.g., a therapeutically effective amount of a plasma kallikrein binding protein) in combination with a second therapy, e.g., nil per os, nasogastric suction, parenteral feeds, and/or a medication (e.g., lactulose and/or erythromycin). The disclosure also provides methods of preventing postoperative ileus or a symptom thereof by administering a plasma kallikrein binding protein (e.g., a prophylactically effective amount of a plasma kallikrein binding protein) to a subject at risk of developing postoperative ileus (e.g., a subject that has had abdominal surgery).

[0843] Guidance for the determination of the dosage that delivers a therapeutically effective amount of a plasma kallikrein binding protein may be obtained from animal models of postoperative ileus, such as a model to investigate postoperative ileus with strain gauge transducers in awake rats (Huge et al. J Surg Res. 74(2): 112-8 (1998)).

### Aortic Aneurysm

[0844] An aortic aneurysm is a general term for any swelling (dilatation or aneurysm) of the aorta, usually representing an underlying weakness in the wall of the aorta at that location. Types of aortic aneurysms include aortic root aneurysm, thoracic aortic aneurysm, abdominal aortic aneurysm, and thoracoabdominal aortic aneurysm.

[0845] Most intact aortic aneurysms do not produce symptoms. As they enlarge, symptoms of aortic aneurysm include, e.g., anxiety or feeling of stress, nausea or vomiting, clammy skin, rapid heart rate, abdominal pain, back pain may develop, leg pain or numbness, erythema nodosum (leg lesions typically found near the ankle region), and a hoarse voice as the left recurrent laryngeal nerve winding around the arch of the aorta is stretched. Once an aneurysm is ruptured, it can cause severe pain and massive internal hemorrhage, and is fatal in the absence of prompt treatment.

[0846] Treatments for aortic aneurysm include, e.g., medications, surgical treatment and endovascular treatment. Smaller aneurysms that are not at high risk for rupturing can be treated with drugs to treat high blood pressure, such as beta-blockers; or doxycycline for matrix metalloproteinase-9 inhibition. Surgical treatment typically involves opening up of the dilated portion of the aorta and insertion of a synthetic (Dacron or Gore-tex) patch tube. Endovascular treatment, as a minimally invasive alternative to open surgery repair, involves the placement of an endovascular stent via a percutaneous technique (usually through the femoral arteries) into the diseased portion of the aorta.

[0847] The disclosure provides methods of treating (e.g., stabilizing, reducing, or eliminating one or more symptoms of) aortic aneurysm by administering a plasma kallikrein binding protein (e.g., a therapeutically effective amount of a plasma kallikrein binding protein) to a subject having or suspected of having aortic aneurysm. Additionally provided are methods of treating aortic aneurysm by administering a plasma kallikrein binding protein (e.g., a therapeutically effective amount of a plasma kallikrein binding protein) in combination with a second therapy, e.g., a medication (e.g., a drug to treat high blood pressure (e.g., a beta-blocker) or doxycycline), surgery, and/or an endovascular treatment. The disclosure also provides methods of preventing aortic aneurysm or a symptom thereof by administering a plasma kallikrein binding protein (e.g., a prophylactically effective amount of a plasma kallikrein binding protein) to a subject at risk of developing aortic aneurysm (e.g., a subject that has high blood pressure).

[0848] Guidance for the determination of the dosage that delivers a therapeutically effective amount of a plasma kallikrein binding protein may be obtained from an animal model of aortic aneurysm, e.g., a rat model of abdominal aortic aneurysm using a combination of intraluminal elastase infusion and extraluminal calcium chloride exposure (Tanaka et al. J Vasc Surg. 50 (6): 1423-32 (2009)).

### Osteoarthritis

[0849] Osteoarthritis, also known as degenerative arthritis, is characterized by the breakdown and eventual loss of the cartilage of one or more joints. Osteoarthritis occurs when the cartilage that cushions the ends of bones in the joints deteriorates over time. The smooth surface of the cartilage becomes rough, causing irritation. If the cartilage wears down completely, the ends of the bones will be damaged. Osteoarthritis commonly affects the hands, feet, spine, and large weight-bearing joints, such as the hips and knees.

[0850] Symptoms of osteoarthritis include, e.g., pain, tenderness, stiffness, loss of flexibility, grating sensation, and bone spurs.

[0851] Treatments for osteoarthritis include, e.g., conservative measures (e.g., rest, weight reduction, physical and occupational therapy) and medications (e.g., acetaminophen, pain-relieving creams applied to the skin over the joints (e.g., capsaicin, salycin, methyl salicylate, and menthol), non-steroidal anti-inflammatory drugs (NSAIDs) (e.g., aspirin, ibuprofen, nabumetone and naproxen), and Cox-2 inhibitors.

[0852] The disclosure provides methods of treating (e.g., stabilizing, reducing, or eliminating one or more symptoms or stabilizing the subject's score on an osteoarthritis scale) osteoarthritis by administering a plasma kallikrein binding protein (e.g., a therapeutically effective amount of a plasma kallikrein binding protein) to a subject having or suspected of having osteoarthritis. Additionally provided are methods of treating osteoarthritis by administering a plasma kallikrein binding protein (e.g., a therapeutically effective amount of a plasma kallikrein binding protein) in combination with a second therapy, e.g., a conservative measure (e.g., rest, weight reduction, physical and/or occupational therapy) and/or a medication (e.g., acetaminophen, a topical pain-relieving cream, an NSAID (e.g., aspirin, ibuprofen, nabumetone, or naproxen), and/or a Cox-2 inhibitor. The disclosure also provides methods of preventing osteoarthritis or a symptom thereof by administering a plasma kallikrein binding protein (e.g., a prophylactically effective amount of a plasma kallikrein binding protein) to a subject at risk of developing osteoarthritis (e.g., a subject that has had a joint injury).

[0853] Scales useful for the assessment of osteoarthritis include, e.g., the Knee Injury and Osteoarthritis Outcome Score (KOOS; Roos et al. (1998) J. Orthop. Sports Phys. Ther. 28 (2): 88-96), Western Ontario and McMaster Universities Osteoarthrtis Index (WOMAC; Roos et al. (2003) Health Qual. Life Outcomes 1(1): 17), and the 36-item Short Form General Health Scale (SF-36 GHS), as well as other assessment tools known in the art.

[0854] Guidance for the determination of the dosage that delivers a therapeutically effective amount of a plasma kallikrein binding protein may be obtained from an animal model of osteoarthritis, e.g., injection of mono-iodoacetate (MIA) into the femorotibial joint of rodents which promotes loss of articular cartilage similar to that noted in human osteoarthritis (Guzman et al. Toxicol Pathol. 31 (6): 619-24 (2003)), and transection of the anterior cruciate ligament (ACL) in canines to induce osteoarthritis (Fife and Brandt J Clin Invest. 84 (5): 1432-1439 (1989)).

### Vasculitis

[0855] Vasculitis refers to a heterogeneous group of disorders that are characterized by inflammatory destruction of blood vessels. Both arteries and veins can be affected. Lymphangitis is sometimes considered a type of vasculitis. Vasculitis is primarily due to leukocyte migration and resultant damage. Vasculitis can be classified by the underlying cause, the location of the affected vessels, or the type or size of the blood vessels. Vasculitis is associated with a number of additional disorders and conditions, e.g., Kawasaki disease, Behçet's disease, Polyarteritis nodosa, Wegener's granulomatosis, Cryoglobulinemia, Takayasu's arteritis, Churg-Strauss syndrome, Giant cell arteritis (temporal arteritis), Henoch-Schönlein purpura, Rheumatic diseases (e.g., rheumatoid arthritis and systemic lupus erythematosus), cancer (e.g., lymphomas), infections (e.g., hepatitis C), exposure to chemicals and drugs (e.g., amphetamines, cocaine, and anthrax vaccines which contain the Anthrax Protective Antigen as the primary ingredient).

[0856] Symptoms of vasculitis include, e.g., fever, weight loss, palpable purpura, livedo reticularis, myalgia or myositis, arthralgia or arthritis, mononeuritis multiplex, headache, stroke, tinnitus, reduced visual acuity, acute visual loss, myocardial infarction, hypertension, gangrene, nose bleeds, bloody cough, lung infiltrates, abdominal pain, bloody stool, perforations, and glomerulonephritis.

[0857] Treatments for vasculitis include, e.g., cortisone-related medications (e.g., prednisone) and immune suppression drugs (e.g., cyclophosphamide).

[0858] The disclosure provides methods of treating (e.g., stabilizing, reducing, or eliminating one or more symptoms or stabilizing the subject's score on a vasculitis scale) vasculitis by administering a plasma kallikrein binding protein (e.g., a therapeutically effective amount of a plasma kallikrein binding protein) to a subject having or suspected of having vasculitis. Additionally provided are methods of treating vasculitis by administering a plasma kallikrein binding protein (e.g., a therapeutically effective amount of a plasma kallikrein binding protein) in combination with a second therapy (e.g., a cortisone-related medication (e.g., prednisone) and/or an immune suppression drug (e.g., cyclophosphamide)). The disclosure also provides methods of preventing vasculitis or a symptom thereof by administering a plasma kallikrein binding protein (e.g., a prophylactically effective amount of a plasma kallikrein binding protein) to a subject at risk of developing vasculitis (e.g., a subject that has had Kawasaki disease, Behçet's disease, Polyarteritis nodosa, Wegener's granulomatosis, Cryoglobulinemia, or Takayasu's arteritis, and so forth).

[0859] The disclosure also provides methods of treating (e.g., stabilizing, reducing, or eliminating one or more symptoms or stabilizing the subject's score on a vasculitis scale) vasculitis associated with systemic lupus erythematosis by administering a plasma kallikrein binding protein (e.g., a therapeutically effective amount of a plasma kallikrein binding protein) to a subject having or suspected of having vasculitis associated with systemic lupus erythematosis. Additionally provided are methods of treating vasculitis associated with systemic lupus erythematosis by administering a plasma kallikrein binding protein (e.g., a therapeutically effective amount of a plasma kallikrein binding protein) in combination with a second therapy, e.g., a cortisone-related medication (e.g., prednisone) and/or an immune suppression drug (e.g., cyclophosphamide).

[0860] Further provided are methods of treating (e.g., ameliorating, stabilizing, or eliminating one or more symptoms) a vasculitis associated disorder (Kawasaki disease, Behçet's disease, Polyarteritis nodosa, Wegener's granulomatosis, Cryoglobulinemia, Takayasu's arteritis, Churg-Strauss syndrome, Giant cell arteritis (temporal arteritis), Henoch-Schönlein purpura, Rheumatic diseases (e.g., rheumatoid arthritis and systemic lupus erythematosus), cancer (e.g., lymphomas), infections (e.g., hepatitis C), exposure to chemicals and drugs (e.g., amphetamines, cocaine, and anthrax vaccines which contain the Anthrax Protective Antigen as the primary ingredient)) by administering a plasma kallikrein binding protein (e.g., a therapeutically effective amount of a plasma kallikrein binding protein) to a subject having or suspected of having a vasculitis associated disorder. The disclosure also provides methods of preventing a vasculitis associated disorder or a symptom thereof by administering a plasma kallikrein binding protein (e.g., a prophylactically effective amount of a plasma kallikrein binding protein) to a subject at risk of developing a vasculitis associated disorder.

[0861] Scales useful for the assessment of osteoarthritis include, e.g., Birmingham Vasculitis Activity score (BVAS) version 3 (Mukhtyar et al. Ann Rheum Dis. 68(12): 1827-32 (2009)), as well as other assessment tools known in the art.

[0862] Guidance for the determination of the dosage that delivers a therapeutically effective amount of a plasma kallikrein binding protein may be obtained from an animal model of vasculitis, see e.g., those described in Katz et al., Clin Rev Allergy Immunol. 35(1-2): 11-8 (2008) and references cited therein.

### Head Trauma

[0863] Head trauma refers to trauma to the head, which may or may not include injury to the brain. Types of head trauma include concussion, epidural hematoma, subdural hematoma, cerebral contusion, and diffuse axonal injury.

[0864] Symptoms of head trauma include, e.g., coma, confusion, drowsiness, personality change, seizures, nausea and vomiting, headache and a lucid interval, during which a patient appears conscious only to deteriorate later, leaking cerebrospinal fluid, visible deformity or depression in the head or face, an eye that cannot move or is deviated to one side can indicate that a broken facial bone is pinching a nerve that innervates eye muscles, wounds or bruises on the scalp or face, basilar skull fractures, a subcutaneous bleed over the mastoid, hemotympanum, cerebrospinal fluid rhinorrhea, and otorrhea.

[0865] Treatments for head trauma include, e.g., controlling elevated intracranial pressure (e.g., sedation, paralytics, cerebrospinal fluid diversion), decompressive craniectomy, barbiturate coma, hypertonic saline, and hypothermia.

[0866] The disclosure provides methods of treating (e.g., stabilizing, reducing, or eliminating one or more symptoms or stabilizing the subject's score on a head trauma scale) head trauma by administering a plasma kallikrein binding protein (e.g., a therapeutically effective amount of a plasma kallikrein binding protein) to a subject having or suspected of having head trauma. Additionally provided are methods of treating head trauma by administering a plasma kallikrein binding protein (e.g., a therapeutically effective amount of a plasma kallikrein binding protein) in combination with a second therapy, e.g., controlling elevated intracranial pressure (e.g., sedation, a paralytic, and/or cerebrospinal fluid diversion), decompressive craniectomy, barbiturate coma, hypertonic saline, and/or hypothermia. The disclosure also provides methods of preventing head trauma or a symptom thereof by administering a plasma kallikrein binding protein (e.g., a prophylactically effective amount of a plasma kallikrein binding protein) to a subject at risk of developing head trauma (e.g., a subject that will be participating in a dangerous activity or contact sport).

[0867] Scales useful for assessing head trauma and symptoms of head trauma include, e.g., the Glasgow Coma Scale (Teasdale and Jennett, Lancet 13; 2(7872): 81-4 (1974)), as well as other assessment tools known in the art.

[0868] Guidance for the determination of the dosage that delivers a therapeutically effective amount of a plasma kallikrein binding protein may be obtained from animal models of head trauma, see, e.g., those described in Cernak, NeuroRx. 2 (3): 410-422 (2005) and references cited therein.

### Brain Edema

[0869] Brain edema (cerebral edema) is an excess accumulation of water in the intracellular and/or extracellular spaces of the brain. Types of brain edema include, e.g., vasogenic cerebral edema, cytotoxic cerebral edema, osmotic cerebral edema, and interstitial cerebral edema.

[0870] Vasogenic cerebral edema is due to a breakdown of tight endothelial junctions which make up the blood-brain barrier (BBB). This allows normally excluded intravascular proteins and fluid to penetrate into cerebral parenchymal extracellular space. Once plasma constituents cross the BBB, the edema spreads; this may be quite fast and widespread. As water enters white matter it moves extracellularly along fiber tracts and can also affect the gray matter. This type of edema is seen in response to trauma, tumors, focal inflammation, late stages of cerebral ischemia and hypertensive encephalopathy. Some of the mechanisms contributing to BBB dysfunction are: physical disruption by arterial hypertension or trauma, tumor-facilitated release of vasoactive and endothelial destructive compounds (e.g., arachidonic acid, excitatory neurotransmitters, eicosanoids, bradykinin, histamine and free radicals). Some of the special subcategories of vasogenic edema include: hydrostatic cerebral edema, cerebral edema from brain cancer, high altitude cerebral edema.

[0871] Cytotoxic cerebral edema is due to the derangement in cellular metabolism resulting in inadequate functioning of the sodium and potassium pump in the glial cell membrane. As a result there is cellular retention of sodium and water. Cytoxotic edema is seen with various intoxications (dinitrophenol, triethyltin, hexachlorophene, isoniazid), in Reye's syndrome, severe hypothermia, early ischemia, encephalopathy, early stroke or hypoxia, cardiac arrest, pseudotumor cerebri, and cerebral toxins.

[0872] Osmotic cerebral edema occurs when plasma is diluted by excessive water intake (or hyponatremia), syndrome of inappropriate antidiuretic hormone secretion (SIADH), hemodialysis, or rapid reduction of blood glucose in hyperosmolar hyperglycemic state (HHS), formerly hyperosmolar non-ketotic acidosis (HONK) and brain osmolality exceeds the serum osmolality creating an abnormal pressure.

[0873] Interstitial cerebral edema occurs in obstructive hydrocephalus. This form of edema is due to rupture of cerebral-spinal fluid (CSF)-brain barrier resulting in trans-ependymal flow of CSF, which permits CSF to penetrate brain and spread in the extracellular space of white matter.

[0874] Symptoms of brain edema (e.g., peritumoral brain edema) include, e.g., headache, loss of coordination (ataxia), weakness, and decreasing levels of consciousness including disorientation, loss of memory, hallucinations, psychotic behavior, and coma.

[0875] Treatments for brain edema (e.g., peritumoral brain edema) include, e.g., medications (e.g. dexamethasone, mannitol, diuretics) and surgical decompression.

[0876] The disclosure provides methods of treating (e.g., stabilizing, reducing, or eliminating one or more symptoms of) brain edema (e.g., peritumoral brain edema) by administering a plasma kallikrein binding protein (e.g., a therapeutically effective amount of a plasma kallikrein binding protein) to a subject having or suspected of having brain edema (e.g., peritumoral brain edema). Additionally provided are methods of treating brain edema (e.g., peritumoral brain edema) by administering a plasma kallikrein binding protein (e.g., a therapeutically effective amount of a plasma kallikrein binding protein) in combination with a second therapy, e.g., a medication (e.g. dexamethasone, mannitol, and/or diuretics) and/or surgical decompression. The disclosure also provides methods of preventing brain edema or a symptom thereof by administering a plasma kallikrein binding protein (e.g., a prophylactically effective amount of a plasma kallikrein binding protein) to a subject at risk of developing brain edema (e.g., a subject that has been diagnosed with a brain tumor).

[0877] Guidance for the determination of the dosage that delivers a therapeutically effective amount of a plasma kallikrein binding protein may be obtained from animal models of brain edema, e.g., a rat model of cerebral embolism in which recirculation can be introduced in the ischemic area (Koizumi et al., Jpn J Stroke 8: 1-8 (1986)).

### Sepsis

[0878] Sepsis is a serious medical condition that is characterized by a whole-body inflammatory state and the presence of a known or suspected infection. This immunological response may be caused by microbes in the blood, urine, lungs, skin, or other tissues and can lead to widespread activation of acute-phase proteins, affecting the complement system and the coagulation pathways, which then cause damage to the vasculature as well as to the organs. Different levels of sepsis include systemic inflammatory response syndrome (SIRS), sepsis (SIRS in response to a confirmed infectious process), severe sepsis (sepsis with organ dysfunction, hypoperfusion, or hypotension), and septic shock (sepsis with refractory arterial hypotension or hypoperfusion abnormalities in spite of adequate fluid resuscitation).

[0879] Symptoms of sepsis include, e.g., general symptoms related to the infection, acute inflammation present throughout the entire body, hypothermia or fever, tachycardia, tachypnea or hypocapnia due to hyperventilation, leukopenia, leukocytosis, bandemia, and organ (e.g., lung, brain, liver, kidney, and/or heart) dysfunction.

[0880] Treatments for sepsis include, e.g., antibiotics, vasopressor drugs, insulin, corticosteroids, drotrecogin alfa, surgical drainage of infected fluid collections, fluid replacement, and appropriate support for organ dysfunction (e.g., hemodialysis in kidney failure, mechanical ventilation in pulmonary dysfunction, transfusion of blood products, and drug and fluid therapy for circulatory failure). Early Goal Directed Therapy (EGDT), a systematic approach to resuscitation, can be used to treat severe sepsis and septic shock.

[0881] The disclosure provides methods of treating (e.g., stabilizing, reducing, or eliminating one or more symptoms or stabilizing the subject's score on a sepsis scale) sepsis by administering a plasma kallikrein binding protein (e.g., a therapeutically effective amount of a plasma kallikrein binding protein) to a subject having or suspected of having sepsis. Additionally provided are methods of treating sepsis by administering a plasma kallikrein binding protein (e.g., a therapeutically effective amount of a plasma kallikrein binding protein) in combination with a second therapy, e.g., an antibiotic, a vasopressor drug, insulin, a corticosteroid, drotrecogin alfa, surgical drainage of infected fluid collections, fluid replacement, an appropriate support for organ dysfunction (e.g., hemodialysis in kidney failure, mechanical ventilation in pulmonary dysfunction, transfusion of blood products, and/or drug and fluid therapy for circulatory failure), and/or an Early Goal Directed Therapy (EGDT). The disclosure also provides methods of preventing sepsis or a symptom thereof by administering a plasma kallikrein binding protein (e.g., a prophylactically effective amount of a plasma kallikrein binding protein) to a subject at risk of developing sepsis (e.g., a subject that has been diagnosed as having an infection).

[0882] Scales useful for assessing sepsis and symptoms of sepsis include, e.g., the Baltimore Sepsis Scale (Meek et al. J Burn Care Rehabil. 12(6): 564-8 (1991)) as well as other assessment tools known in the art.

[0883] Guidance for the determination of the dosage that delivers a therapeutically effective amount of a plasma kallikrein binding protein may be obtained from animal models of sepsis, see, e.g., those described in U.S. Pat. No. 6,964,856, and Buras et al. Nat Rev Drug Discov. 4 (10): 854-65 (2005) and references cited therein.

### Acute Middle Cerebral Artery (MCA) Ischemic Event (Stroke)

[0884] An acute middle cerebral artery (MCA) ischemic event (stroke) is the rapidly developing loss of brain function(s) due to disturbance in the blood supply to the brain due to ischemia (lack of glucose and oxygen supply) caused by thrombosis (e.g., venous thrombosis), embolism, or systemic hypoperfusion. As a result, the affected area of the brain is unable to function, leading to inability to move one or more limbs on one side of the body, inability to understand or formulate speech, or inability to see one side of the visual field. A stroke is a medical emergency and can cause permanent neurological damage, complications, and/or death.

[0885] Symptoms of acute middle cerebral artery (MCA) ischemic event (stroke) include, e.g., hemiplegia, decreased sensation and muscle weakness of the face, numbness, reduction in sensory or vibratory sensation, altered smell, taste, hearing or vision (total or partial), drooping of eyelid (ptosis) and weakness of ocular muscles, decreased reflexes, balance problems and nystagmus, altered breathing and heart rate, weakness in sternocleidomastoideole with inability to turn head to one side, weakness in tongue (inability to protrude and/or move from side to side), aphasia, apraxia, visual field defect, memory deficits, hemineglect, disorganized thinking, confusion, hypersexual gestures, anosognosia, trouble walking, altered movement coordination, and vertigo and/or disequilibrium.

[0886] Treatment for acute middle cerebral artery (MCA) ischemic event (stroke) includes, e.g., thrombolysis (e.g., tissue plasminogen activator (tPA)), thrombectomy, angioplasty and stenting, therapeutic hypothermia, and medications (e.g., aspirin, clopidogrel and dipyridamole).

[0887] The disclosure provides methods of treating (e.g., stabilizing, reducing, or eliminating one or more symptoms or stabilizing the subject's score on a stroke scale) acute middle cerebral artery (MCA) ischemic event (stroke) by administering a plasma kallikrein binding protein (e.g., a therapeutically effective amount of a plasma kallikrein binding protein) to a subject having or suspected of having acute middle cerebral artery (MCA) ischemic event (stroke). Additionally provided are methods of treating acute middle cerebral artery (MCA) ischemic event (stroke) by administering a plasma kallikrein binding protein (e.g., a therapeutically effective amount of a plasma kallikrein binding protein) in combination with a second therapy, e.g., thrombolysis (e.g., tissue plasminogen activator (tPA)), thrombectomy, angioplasty and stenting, therapeutic hypothermia, and/or a medication (e.g., aspirin, clopidogrel and dipyridamole). The disclosure also provides methods of preventing acute middle cerebral artery (MCA) ischemic event (stroke) or a symptom thereof by administering a plasma kallikrein binding protein (e.g., a prophylactically effective amount of a plasma kallikrein binding protein) to a subject at risk of developing acute middle cerebral artery (MCA) ischemic event (stroke) (e.g., a subject that has experienced systemic hypoperfusion).

[0888] Scales useful for assessing acute middle cerebral artery (MCA) ischemic event (stroke) and symptoms of acute middle cerebral artery (MCA) ischemic event (stroke) include, e.g., Oxford Community Stroke Project classification (OCSP, also known as the Bamford or Oxford classification) (Bamford et al., Lancet 337 (8756): 1521-6 (1991)), and TOAST (Trial of Org 10172 in Acute Stroke Treatment) (Adams et al., Stroke 24(1): 35-41 (1993)).

[0889] Guidance for the determination of the dosage that delivers a therapeutically effective amount of a plasma kallikrein binding protein may be obtained from animal models of acute middle cerebral artery (MCA) ischemic event (stroke), see, e.g., those described in Beech et al., Brain Res 895: 18-24 (2001), Buchan et al., Stroke 23 (2): 273-9 (1992), Carmichael, NeuroRx 2:396-409 (2005), Chen et al., Stroke 17 (4): 738-43 (1986), Dittmar et al., Stroke 34:2252-7 (2003), Dittmar et al., J Neurosci Methods 156:50 (2006), Gerriets et al., J Neurosci Methods 122:201-11 (2003), Gerriets et al., Stroke 35:2372-2377 (2004), Graham et al., Comp Med 54:486-496 (2004), Koizumi et al., Jpn J Stroke 8: 1-8 (2004), Longa et al., Stroke 20(1): 84-91 (1989), Mayzel-Oreg, Magn Reson Med 51:1232-8 (2004), Schmid-Elsaesser et al., Stroke 29 (10): 2162-70 (1989), Tamura et al., J Cereb Blood Flow Metab 1:53-60 (1981), Watson et al., Ann Neurol 17:497-504 (1985), and Zhang et al., J Cereb Blood Flow Metab 17:123-35 (1997).

### Restenosis

[0890] Restenosis is the reoccurrence of stenosis, a narrowing of a blood vessel, leading to restricted blood flow. Restenosis usually pertains to an artery or other large blood vessel that has become narrowed, received treatment to clear the blockage such as angioplasty, and subsequently become renarrowed. It can be defined as a reduction in the circumference of the lumen of 50% or more, and had a high incidence rate (25-50%) in patients who had undergone balloon angioplasty, with the majority of patients needing further angioplasty within 6 months.

[0891] Treatments for restenosis include, e.g., additional angioplasty if restenosis occurs without a stent or at either end of a stent, repeated angioplasty and insertion of another stent inside the original if restenosis occurs within a stent, drug-eluted stents, brachytherapy, and intracoronary radiation.

[0892] The disclosure provides methods of treating (e.g., stabilizing, reducing, or eliminating one or more symptoms of) restenosis (e.g., after angioplasty) by administering a plasma kallikrein binding protein (e.g., a therapeutically effective amount of a plasma kallikrein binding protein) to a subject having or suspected of having restenosis (e.g., after angioplasty). Additionally provided are methods of treating restenosis (e.g., after angioplasty) by administering a plasma kallikrein binding protein (e.g., a therapeutically effective amount of a plasma kallikrein binding protein) in combination with a second therapy, e.g., angioplasty if restenosis occurs without a stent or at either end of a stent, repeated angioplasty and insertion of another stent inside the original if restenosis occurs within a stent, a drug-eluted stent, brachytherapy, and/or intracoronary radiation. The disclosure also provides methods of preventing restenosis or a symptom thereof by administering a plasma kallikrein binding protein (e.g., a prophylactically effective amount of a plasma kallikrein binding protein) to a subject at risk of developing restenosis (e.g., a subject that has had stenosis).

[0893] Guidance for the determination of the dosage that delivers a therapeutically effective amount of a plasma kallikrein binding protein may be obtained from animal models of restenosis, see, e.g., those described in U.S. Pat. Nos. 5,304,122 and 6,034,053, and Kantor et al., Cardiovasc Radiat Med. 1(1): 48-54 (1999), and references cited therein.

### Systemic Lupus Erythematosus Nephritis

[0894] Systemic lupus erythematosus nephritis is an inflammation of the kidney caused by systemic lupus erythematosus (SLE), a chronic autoimmune connective tissue disease. SLE can be associated with vasculitis which are disorders characterized by inflammatory destruction of blood vessels.

[0895] Symptoms of systemic lupus erythematosus nephritis include, e.g., general symptoms of kidney disease, weight gain, high blood pressure, darker foamy urine, and swelling around the eyes, legs, ankles or fingers.

[0896] Treatments for systemic lupus erythematosus nephritis include, e.g., steroid therapy (e.g., corticosteroids), chemotherapy (e.g., cyclophosphamide, azathioprine, mycophenolate mofetil, or cyclosporine), and immunosuppressant agents (e.g., mycophenolate mofetil and intravenous cyclophosphamide).

[0897] The disclosure provides methods of treating (e.g., stabilizing, reducing, or eliminating one or more symptoms or stabilizing the subject's score on a lupus scale) systemic lupus erythematosus nephritis by administering a plasma kallikrein binding protein (e.g., a therapeutically effective amount of a plasma kallikrein binding protein) to a subject having or suspected of having systemic lupus erythematosus nephritis. Additionally provided are methods of treating systemic lupus erythematosus nephritis by administering a plasma kallikrein binding protein (e.g., a therapeutically effective amount of a plasma kallikrein binding protein) in combination with a second therapy, e.g., steroid therapy (e.g., a corticosteroid), chemotherapy (e.g., cyclophosphamide, azathioprine, mycophenolate mofetil, and/or cyclosporine), and/or an immunosuppressant agent (e.g., mycophenolate mofetil and/or intravenous cyclophosphamide). The disclosure also provides methods of preventing systemic lupus erythematosus nephritis or a symptom thereof by administering a plasma kallikrein binding protein (e.g., a prophylactically effective amount of a plasma kallikrein binding protein) to a subject at risk of developing systemic lupus erythematosus nephritis (e.g., a subject that has been diagnosed with lupus or a subject having a family member with lupus or a genetic predisposition thereto).

[0898] Scales useful for assessing systemic lupus erythematosus nephritis and symptoms of systemic lupus erythematosus nephritis include, e.g., World Health Organization (WHO) classification based on the biopsy (Weening et al., J. Am. Soc. Nephrol. 15 (2): 241-50 (2004)) as well as other assessment tools known in the art.

[0899] Guidance for the determination of the dosage that delivers a therapeutically effective amount of a plasma kallikrein binding protein may be obtained from animal models of systemic lupus erythematosus nephritis, see, e.g., those described in U.S. Pat. No. 726,5261, Peng, Methods Mol Med. 102:227-72 (2004), and references cited therein.

### Burn Injury and Wound Healing

[0900] A burn injury is a type of injury that may be caused by heat, electricity, chemicals, light, radiation, or friction. Muscle, bone, blood vessel, dermal and epidermal tissue can all be damaged with subsequent pain due to profound injury to nerves. Depending on the location affected and the degree of severity, a burn victim may experience a wide number of potentially fatal complications including shock, infection, electrolyte imbalance and respiratory distress. In burn injuries, the damage to epidermis and dermal elements is the result of several key insults which can be divided into initial (e.g., heat injury, inflammatory mediator injury, ischemia induced injury) and delayed insults. Excess heat causes rapid protein denaturation and cell damage. Much of the tissue damage, e.g., in the perfused subsurface burn, can be caused by toxic mediators of inflammation (e.g., oxidants and/or proteases) which are activated with the burn. Consumption of wound oxygen by neutrophils can lead to tissue hypoxia. Instant surface vascular thrombosis occurs along with cell death from the heat insult and causes ischemia and further tissue damage. Delayed injury after the initial heat and mediator damage includes, e.g., inflammation caused by neurotic tissue, bacteria on surface, caustic topical agents, and surface exudate; and continued damage to viable cells and new tissue growth by excess wound proteolytic activity and oxidant release.

[0901] Treatments of burn injury include, e.g., intravenous fluids, dressings, pain management (e.g., analgesics (e.g., ibuprofen and acetaminophen), narcotics, and local anesthetics), inflammatory mediator inhibitors, and antibiotics.

[0902] The disclosure provides methods of treating (e.g., stabilizing, reducing, or eliminating one or more symptoms or stabilizing the subject's score on a burn scale) a burn injury and/or promoting wound healing by administering a plasma kallikrein binding protein (e.g., a therapeutically effective amount of a plasma kallikrein binding protein) to a subject having or suspected of having a burn injury. Additionally provided are methods of treating a burn injury by administering a plasma kallikrein binding protein (e.g., a therapeutically effective amount of a plasma kallikrein binding protein) in combination with a second therapy, e.g., intravenous fluid, a dressing, pain management (e.g., an analgesic (e.g., ibuprofen and acetaminophen), a narcotic, and a local anesthetic), an inflammatory mediator inhibitor, and an antibiotic. The disclosure also provides methods of preventing burn injuries or a symptom thereof by administering a plasma kallikrein binding protein (e.g., a prophylactically effective amount of a plasma kallikrein binding protein) to a subject at risk of developing burn injuries (e.g., a subject whose occupation creates a risk of a burn injury, e.g., firefighter or cook).

[0903] Scales useful for assessing burns and symptoms of burns include, e.g., burn scales by degrees, by thickness, and by total body surface area (TBSA) (Meek et al. J Burn Care Rehabil. 12(6): 564-8 (1991)) as well as other assessment tools known in the art. Guidance for the determination of the dosage that delivers a therapeutically effective amount of a plasma kallikrein binding protein may be obtained from animal models of burn, such as a porcine burn model (Singer and McClain, Methods Mol Med. 78:107-19 (2003), a sheep model of thermal injury (Jonkam et al., Shock, 28:704-709 (2007)), a rabbit model of thermal injury (Nwariaku et al., Burns, 22:324-327 (1996)), and a mouse model of burn wounding (Stevenson et al., Methods Mol Med. 78:95-105 (2003)).

### Combination Therapies

[0904] A plasma kallikrein binding protein described herein, e.g., an anti-plasma kallikrein antibody, e.g., an anti-plasma kallikrein Fab or IgG, can be administered in combination with one or more of the other therapies for treating a disease or condition associated with plasma kallikrein activity, e.g., a disease or condition described herein. For example, a plasma kallikrein binding protein can be used therapeutically or prophylactically with surgery, another anti-plasma kallikrein Fab or IgG (e.g., another Fab or IgG described herein), another plasma kallikrein inhibitor, a peptide inhibitor, or small molecule inhibitor. Examples of plasma kallikrein inhibitors that can be used in combination therapy with a plasma kallikrein binding protein described herein include plasma kallikrein inhibitors described in, e.g., WO 95/21601 or WO 2003/103475.

[0905] One or more plasma kallikrein inhibitors can be used in combination with one or more plasma kallikrein binding proteins described herein. For example, the combination can result in a lower dose of the inhibitor being needed, such that side effects are reduced.

[0906] A plasma kallikrein binding protein described herein can be administered in combination with one or more current therapies for treating a plasma kallikrein associated disease or condition, including, but not limited to the current therapies for treating the disorder, e.g., a current therapy for rheumatoid arthritis, gout, intestinal bowel disease, oral mucositis, neuropathic pain, inflammatory pain, spinal stenosis-degenerative spine disease, arterial or venous thrombosis, post operative ileus, aortic aneurysm, osteoarthritis, vasculitis, head trauma or peri-tumor brain edema, sepsis, acute middle cerebral artery (MCA) ischemic event (stroke), restenosis (e.g., after angioplasty), systemic lupus erythematosis nephritis, burn injury, or wound healing. For example, pKal inhibition is a novel mechanism of treating disease and therefore could provide effects that are synergistic or additive with other therapeutics. For example, a protein described herein that inhibits plasma kallikrein or that inhibits a downstream event of plasma kallikrein activity can also be used in combination with another treatment for a plasma kallikrein associated disease, such as surgery or administration of a second agent, e.g., as described herein. For example, the second agent can include ecallantide, a C1 esterase inhibitor (e.g., CINRYZE™), aprotinin (TRASYLOL®), a bradykinin B2 receptor inhibitor (e.g., icatibant (FIRAZYR®)).

[0907] The term “combination” refers to the use of the two or more agents or therapies to treat the same patient, wherein the use or action of the agents or therapies overlap in time. The agents or therapies can be administered at the same time (e.g., as a single formulation that is administered to a patient or as two separate formulations administered concurrently) or sequentially in any order. Sequential administrations are administrations that are given at different times. The time between administration of the one agent and another agent can be minutes, hours, days, or weeks. The use of a plasma kallikrein binding protein described herein can also be used to reduce the dosage of another therapy, e.g., to reduce the side effects associated with another agent that is being administered. Accordingly, a combination can include administering a second agent at a dosage at least 10, 20, 30, or 50% lower than would be used in the absence of the plasma kallikrein binding protein.

[0908] The second agent or therapy can also be another agent for a plasma kallikrein associated therapy. Non-limiting examples of another treatment for a plasma kallikrein associated disease or condition include, e.g., ecallantide, a C1 esterase inhibitor (e.g., CINRYZE™), aprotinin (TRASYLOL®), a bradykinin B2 receptor inhibitor (e.g., icatibant (FIRAZYR®)) or a second binding protein described herein.

[0909] A combination therapy can include administering an agent that reduces the side effects of other therapies. The agent can be an agent that reduces the side effects of a plasma kallikrein associated disease treatment. For example, for inflammatory diseases, a pKal inhibitor could be steroid sparring. Also, there could be synergism with a TNF-alpha inhibitor for treating inflammation or a VEGF blocker for treating cancer and/or angiogenesis.

### Diagnostic Uses

[0910] A protein that binds to plasma kallikrein described herein can have in vitro and in vivo diagnostic utilities. A plasma kallikrein binding protein described herein (e.g., a protein that binds or binds and inhibits plasma kallikrein) can be used, e.g., for in vivo imaging, e.g., during a course of treatment for a disease or condition in which plasma kallikrein is active, e.g., a disease or condition described herein, or in diagnosing a disease or condition described herein.

[0911] In one aspect, the disclosure provides a diagnostic method for detecting the presence of plasma kallikrein, in vitro or in vivo (e.g., in vivo imaging in a subject). The method can include localizing plasma kallikrein within a subject or within a sample from a subject. With respect to sample evaluation, the method can include, for example: (i) contacting a sample with plasma kallikrein binding protein; and (ii) detecting the location of the plasma kallikrein binding protein in the sample.

[0912] A plasma kallikrein binding protein can also be used to determine the qualitative or quantitative level of expression of plasma kallikrein in a sample. The method can also include contacting a reference sample (e.g., a control sample, e.g., a negative control) with the binding protein, and determining a corresponding assessment of the reference sample. A difference (e.g., increase), e.g., a statistically significant difference, in the formation of the complex in the sample or subject relative to the control sample or subject can be indicative of the presence of plasma kallikrein in the sample. In one embodiment, the plasma kallikrein binding protein does not cross react with another kallikrein protein, such as tissue kallikrein and/or with plasma prekallikrein. E.g., the binding protein binds to another kallikrein protein or to prekallikrein 5- to 10-fold less well (or even less well) than it binds to plasma kallikrein. For example, the binding protein can bind to plasma kallikrein with a K_{D} of ˜10-50 pM, whereas it binds to tissue kallikrein and/or prekallikrein at ˜10 nM.

[0913] The plasma kallikrein binding protein can be directly or indirectly labeled with a detectable substance to facilitate detection of the bound or unbound antibody. Suitable detectable substances include various enzymes, prosthetic groups, fluorescent materials, luminescent materials and radioactive materials.

[0914] Complex formation between the plasma kallikrein binding protein and plasma kallikrein can be detected by evaluating the binding protein bound to the plasma kallikrein or unbound binding protein. Conventional detection assays can be used, e.g., an enzyme-linked immunosorbent assays (ELISA), a radioimmunoassay (RIA) or tissue immunohistochemistry. Further to labeling the plasma kallikrein binding protein, the presence of plasma kallikrein can be assayed in a sample by a competition immunoassay utilizing standards labeled with a detectable substance and an unlabeled plasma kallikrein binding protein. In one example of this assay, the biological sample, the labeled standards, and the plasma kallikrein binding protein are combined and the amount of labeled standard bound to the unlabeled binding protein is determined. The amount of plasma kallikrein in the sample is inversely proportional to the amount of labeled standard bound to the plasma kallikrein binding protein.

[0915] Fluorophore and chromophore labeled proteins can be prepared. Because antibodies and other proteins absorb light having wavelengths up to about 310 nm, the fluorescent moieties should be selected to have substantial absorption at wavelengths above 310 nm and preferably above 400 nm. A variety of suitable fluorescers and chromophores are described by Stryer, 1968, Science 162:526 and Brand, L. et al., 1972, Annu. Rev. Biochem. 41:843-868. The proteins can be labeled with fluorescent chromophore groups by conventional procedures such as those disclosed in U.S. Pat. Nos. 3,940,475, 4,289,747, and 4,376,110. One group of fluorescers having a number of the desirable properties described above is the xanthene dyes, which include the fluoresceins and rhodamines. Another group of fluorescent compounds are the naphthylamines. Once labeled with a fluorophore or chromophore, the protein can be used to detect the presence or localization of the plasma kallikrein in a sample, e.g., using fluorescent microscopy (such as confocal or deconvolution microscopy).

[0916] Histological Analysis. Immunohistochemistry can be performed using the proteins described herein. For example, in the case of an antibody, the antibody can be synthesized with a label (such as a purification or epitope tag), or can be detectably labeled, e.g., by conjugating a label or label-binding group. For example, a chelator can be attached to the antibody. The antibody is then contacted to a histological preparation, e.g., a fixed section of tissue that is on a microscope slide. After an incubation for binding, the preparation is washed to remove unbound antibody. The preparation is then analyzed, e.g., using microscopy, to identify if the antibody bound to the preparation.

[0917] Of course, the antibody (or other polypeptide or peptide) can be unlabeled at the time of binding. After binding and washing, the antibody is labeled in order to render it detectable.

[0918] Protein Arrays. The plasma kallikrein binding protein can also be immobilized on a protein array. The protein array can be used as a diagnostic tool, e.g., to screen medical samples (such as isolated cells, blood, sera, biopsies, and the like). Of course, the protein array can also include other binding proteins, e.g., that bind to plasma kallikrein or to other target molecules.

[0919] Methods of producing polypeptide arrays are described, e.g., in De Wildt et al., 2000, Nat. Biotechnol. 18:989-994; Lueking et al., 1999, Anal. Biochem. 270:103-111; Ge, 2000, Nucleic Acids Res. 28, e3, I-VII; MacBeath and Schreiber, 2000, Science 289:1760-1763; WO 01/40803 and WO 99/51773A1. Polypeptides for the array can be spotted at high speed, e.g., using commercially available robotic apparati, e.g., from Genetic MicroSystems or BioRobotics. The array substrate can be, for example, nitrocellulose, plastic, glass, e.g., surface-modified glass. The array can also include a porous matrix, e.g., acrylamide, agarose, or another polymer.

[0920] For example, the array can be an array of antibodies, e.g., as described in De Wildt, supra. Cells that produce the proteins can be grown on a filter in an arrayed format. Polypeptide production is induced, and the expressed polypeptides are immobilized to the filter at the location of the cell. A protein array can be contacted with a labeled target to determine the extent of binding of the target to each immobilized polypeptide. Information about the extent of binding at each address of the array can be stored as a profile, e.g., in a computer database. The protein array can be produced in replicates and used to compare binding profiles, e.g., of a target and a non-target.

[0921] FACS (Fluorescence Activated Cell Sorting). The plasma kallikrein binding protein can be used to label cells, e.g., cells in a sample (e.g., a patient sample). The binding protein is also attached (or attachable) to a fluorescent compound. The cells can then be sorted using fluorescence activated cell sorter (e.g., using a sorter available from Becton Dickinson Immunocytometry Systems, San Jose CA; see also U.S. Pat. Nos. 5,627,037; 5,030,002; and 5,137,809). As cells pass through the sorter, a laser beam excites the fluorescent compound while a detector counts cells that pass through and determines whether a fluorescent compound is attached to the cell by detecting fluorescence. The amount of label bound to each cell can be quantified and analyzed to characterize the sample.

[0922] The sorter can also deflect the cell and separate cells bound by the binding protein from those cells not bound by the binding protein. The separated cells can be cultured and/or characterized.

[0923] In vivo Imaging. Also featured is a method for detecting the presence of plasma kallikrein expressing tissues in vivo. The method includes (i) administering to a subject (e.g., a patient having, e.g., a plasma kallikrein associated disease or condition) an anti-plasma kallikrein antibody, conjugated to a detectable marker; (ii) exposing the subject to a means for detecting said detectable marker to the plasma kallikrein expressing tissues or cells. For example, the subject is imaged, e.g., by NMR or other tomographic means.

[0924] Examples of labels useful for diagnostic imaging include radiolabels such as ¹³¹I, ¹¹¹In, ¹²³I, ^{99m}Tc, ³²P, ¹²⁵I, ³H, ¹⁴C, and ¹⁸⁸Rh, fluorescent labels such as fluorescein and rhodamine, nuclear magnetic resonance active labels, positron emitting isotopes detectable by a positron emission tomography (“PET”) scanner, chemiluminescers such as luciferin, and enzymatic markers such as peroxidase or phosphatase. Short range radiation emitters, such as isotopes detectable by short range detector probes can also be employed. The protein can be labeled with such reagents; for example, see Wensel and Meares, 1983, Radioimmunoimaging and Radioimmunotherapy, Elsevier, New York for techniques relating to the radiolabeling of antibodies and D. Colcher et al., 1986, Meth. Enzymol. 121:802-816.

[0925] The binding protein can be labeled with a radioactive isotope (such as ¹⁴C, ³H, ³⁵S, ¹²⁵I, ³²P, ¹³¹I). A radiolabeled binding protein can be used for diagnostic tests, e.g., an in vitro assay. The specific activity of a isotopically-labeled binding protein depends upon the half life, the isotopic purity of the radioactive label, and how the label is incorporated into the antibody.

[0926] In the case of a radiolabeled binding protein, the binding protein is administered to the patient, is localized to cells bearing the antigen with which the binding protein reacts, and is detected or “imaged” in vivo using known techniques such as radionuclear scanning using e.g., a gamma camera or emission tomography. See e.g., A. R. Bradwell et al., “Developments in Antibody Imaging”, Monoclonal Antibodies for Cancer Detection and Therapy, R.W. Baldwin et al., (eds.), pp 65 85 (Academic Press 1985). Alternatively, a positron emission transaxial tomography scanner, such as designated Pet VI located at Brookhaven National Laboratory, can be used where the radiolabel emits positrons (e.g., ¹¹C, ¹⁸F, ¹⁵O, and ¹³N).

[0927] MRI Contrast Agents. Magnetic Resonance Imaging (MRI) uses NMR to visualize internal features of living subject, and is useful for prognosis, diagnosis, treatment, and surgery. MRI can be used without radioactive tracer compounds for obvious benefit. Some MRI techniques are summarized in EP-A-0 502 814. Generally, the differences related to relaxation time constants T1 and T2 of water protons in different environments are used to generate an image. However, these differences can be insufficient to provide sharp high resolution images.

[0928] The differences in these relaxation time constants can be enhanced by contrast agents. Examples of such contrast agents include a number of magnetic agents paramagnetic agents (which primarily alter T1) and ferromagnetic or superparamagnetic (which primarily alter T2 response). Chelates (e.g., EDTA, DTPA and NTA chelates) can be used to attach (and reduce toxicity) of some paramagnetic substances (e.g., Fe⁺³, Mn⁺², Gd⁺³). Other agents can be in the form of particles, e.g., less than 10 mm to about 10 nM in diameter). Particles can have ferromagnetic, antiferromagnetic, or superparamagnetic properties. Particles can include, e.g., magnetite (Fe₃O₄), γ-Fe₂O₃, ferrites, and other magnetic mineral compounds of transition elements. Magnetic particles may include: one or more magnetic crystals with and without nonmagnetic material. The nonmagnetic material can include synthetic or natural polymers (such as sepharose, dextran, dextrin, starch and the like.

[0929] The plasma kallikrein binding protein can also be labeled with an indicating group containing of the NMR active ¹⁹F atom, or a plurality of such atoms inasmuch as (i) substantially all of naturally abundant fluorine atoms are the ¹⁹F isotope and, thus, substantially all fluorine containing compounds are NMR active; (ii) many chemically active polyfluorinated compounds such as trifluoracetic anhydride are commercially available at relatively low cost; and (iii) many fluorinated compounds have been found medically acceptable for use in humans such as the perfluorinated polyethers utilized to carry oxygen as hemoglobin replacements. After permitting such time for incubation, a whole body MRI is carried out using an apparatus such as one of those described by Pykett, 1982, Sci. Am. 246:78 88 to locate and image tissues expressing plasma kallikrein.

[0930] The following examples provide further illustration and are not limiting.

### EXAMPLES

### Example 1

[0931] We have discovered several antibody inhibitors and binders of plasma kallikrein (pKal). The most potent of these have been further characterized and shown to have apparent inhibition constants (K_{i,app})<10 nM, to be specific pKal inhibitors with respect to other tested serine proteases, and to not bind prekallikrein. Amino acid sequences of the CDRs for the inhibitors and the binders are shown in Tables 1 and 2, respectively.

TABLE 1
CDR Amino Acid Sequences, ELISA Signal, and Apparent Inhibition Constant of Antibody Inhibitors of PKal

| | Human | Human | | | | | | |
|---|---|---|---|---|---|---|---|---|
| | pKal | pKal | | | | | | |
| Initial | ELISA | (Ki, | | | | | | |
| Name | (T/B) | app nM) | LV-CDR1 | LV-CDR2 | LV-CDR3 | HV-CDR1 | HV-CDR2 | HV-CDR3 |
| M6-D09 | 39.9 | 5.9 | RASQSIRNYLN | AASTLQS | QQLSGYPHT | FYYMV | VIYPSGGITVYADSVKG | DKWAVMPPYYYYAMDV |
| M7-B04 | 4.1 | 54 | TGTNSDVGNYNLVS | EVNKRPS | CSYAGNRNFYV | WYSMV | SISPSGGLTNYADSVKG | HTAARPFYYYYMDV |
| M7-E07 | 45.7 | 36 | SGDKLGDKYAC | QDSKRPS | QAWDSSTGV | WYLMI | YIYPSGGFTYYADSVKG | TEGPLSWGYGMDV |
| M8-A09 | 5.4 | 105 | SGDKLGNKYAY | QDNNRPS | QAWDSRTW | TYFML | SIYPSGGNTVYADSVKG | AASPVRNYYYYGMDV |
| M10-F10 | 39.2 | <100 nM | RASQSISVYLN | GASNLQF | QQTFSLFT | FYNMN | SISPSGGETNYADSVKG | GGGAYRNNWWGGFDI |
| M10-H05 | 42.2 | 18 | RASQSVSSSYLA | GASSRAT | QQYGSSPFT | PYNMY | SIRPSGGGTVYADSVKG | GFIAARWYYFDY |
| M12-D05 | 48.5 | 5.2 | SGDQLGDKYVG | QDTKRPS | QAWDTSTAG | WYTMV | RIYPSGGWTKYADSVKG | EGLLWFGENAFDI |
| M27-E05 | 41.3 | 16 | SGDKLGDKYAC | QDSKRPS | QAWDSSTGV | WYLMI | YIYPSGGFTYYADSVKG | TEGPLSWGYGMDV |
| M28-B11 | 33.3 | 5.5 | SGDQLGDKYVG | QDTKRPS | QAWDTSTAG | WYTMV | RIYPSGGWTKYADSVKG | EGLLWFGENAFDI |
| M29-D09 | 47.5 | 0.7 | SGNKLGDKYVA | QDTKRPS | QAWDSSIVI | WYTMV | YIYPSGGATFYADSVKG | GSYDYIWGFYSDH |
| M29-E09 | 28.8 | 11 | SGDNLGNKYNS | QDTKRPS | QAWDGNW | WYEMG | SIYSSGGGTMYADSVKG | NPQYSGYDRSLSDGAFDI |
| M35-G04 | 11.1 | 2.9 | RASQSVSSYLA | DASNRAT | QQRSNWPRGFT | YYHMS | VISPSGGSTKYADSVKG | GGSSDYAWGSYRRPYYFDY |
| M38-F02 | 33.5 | 14 | SGEKLGDKYVS | EDSRRPS | QAWDSSTAI | YYMMV | YIYSSGGHTVYADSVKG | DLFLYDFWSKGAFDI |
| M41-A11 | 28.0 | 13 | SGDKLGDKYTS | QDIKRPS | QAWDSPNARV | HYRMS | SIYPSGGRTVYADSVKG | DKFEWRLLFRGIGNDAFDI |
| M73-D06 | 4.0 | <100 nM | SGSSSNIGSNTVS | NDHRRPS | SAWDDSLNGW | RYEMY | SISSSGGPTAYADSVKG | GTPKWELLLRSIYIENAFDI |
| M76-D01 | 11.2 | <100 nM | RSSQSLSDDGNTYLD | TLSYRAS | MQGTHWPPT | FYAMH | GIVPSGGRTHYADSVKG | DSSGSPNPLFDY |
| M110-C12 | 2.4 | <100 nM | RSSLSLLHSNGYNYLD | LSSTRAS | MQPLETPPT | YYEMD | GISSSGGHTAYADSVKG | ERRSSSRARYYYGMDV |
| M137-E12 | 4.5 | 79 | SGNNSNFGSNTVT | SDSRRPS | AAWDDSLNGV | DYRMQ | VIVPSGGNTMYADSVKG | GGPGSSIAARRAPTGYYGMDV |
| M142-H08 | 29.9 | 0.2 | RASQPIDNYLN | AASRLQS | QQSYTVPYT | AYSMI | YIRPSGGRTTYADSVKG | GGLLLWFRELKSNYFDY |
| M145-D01 | 6.2 | 1.1 | RASQSVSSYLA | DASNRAT | QQRSNWPRGFT | YYHMS | VISPSGGSTKYADSVKG | GGSSDYAWGSYRRPYYFDY |
| M145-D11 | 40.0 | 0.79 | SGDKLGDKYTS | QDIKRPS | QAWDSPNARV | HYRMS | SIYPSGGRTVYADSVKG | DKFEWRLLFRGIGNDAFDI |
| M146-E12 | 49.6 | 2.2 | RASGDIGNALG | DASTLQS | LQGYNYPRT | RYIMH | SISPSGGLTSYADSVKG | EFENAYHYYYYGMDV |
| M152-A12 | 19. | <100 nM | RASQSISSYLS | AASSLQS | QQSISIPRT | PYFMG | GIGPSGGSTTYADSVKG | EGPPYSSGWYRGLRQYHFDY |
| M160-G12 | 38.3 | 17 | RASQGISSYLA | AASTLQS | QQLNSYPLT | HYLMT | YISPSGGHTIYADSVKG | VARGIAARSRTSYFDY |
| M161-C11 | 41.8 | 0.3 | SGDKLGDKYVS | QDTKRPS | QAWDSSTYV | DYAMK | SISSSGGVTQYADSVKG | EEDYSSSWYSRRFDYYYGMDV |
| M162-A04 | 11.4 | 4.8 | RASQSISSWLA | KASTLES | QQYNTYWT | HYIMM | GIYSSGGITVYADSVKG | RRTGIPRRDAFDI |
| X67-B03 | nd | 2.1 | RASQPIDNYLN | AASRLQS | QQSYTVPYT | AYSMI | YIRPSGGRTTYADSVKG | GGLLLWSRELKSNYFDY |
| X67-C03 | nd | 0.7 | RASQPIDNYLN | AASRLQS | QQSYTVPYT | AYSMI | YIRPSGGRTTYADSVKG | GGLLLWFMELKSNYFDY |
| X67-C09 | nd | 8.6 | RASQPIDNYLN | AASRLQS | QQSYTVPYT | AYSMI | YIRPSGGRTTYADSVKG | GGLLLWGRELKSNYFDY |
| X67-D03 | nd | 0.1 | RASQPIDNYLN | AASRLQS | QQSYTVPYT | AYSMI | YIRPSGGRTTYADSVKG | GGLLLWNRELKSNYFDY |
| X67-E04 | nd | 1.3 | RASQPIDNYLN | AASRLQS | QQSYTVPYT | AYSMI | YIRPSGGRTTYADSVKG | GGLLLWDRELKSNYFDY |
| X67-F01 | nd | 0.9 | RASQPIDNYLN | AASRLQS | QQSYTVPYT | AYSMI | YIRPSGGRTTYADSVKG | GGLLLWQRELKSNYFDY |
| X67-F10 | nd | 1.3 | RASQPIDNYLN | AASRLQS | QQSYTVPYT | AYSMI | YIRPSGGRTTYADSVKG | GGLLLWTRELKSNYFDY |
| X67-G04 | nd | 0.35 | RASQPIDNYLN | AASRLQS | QQSYTVPYT | AYSMI | YIRPSGGRTTYADSVKG | GGLLLWARELKSNYFDY |
| X67-H04 | nd | 3.6 | RASQPIDNYLN | AASRLQS | QQSYTVPYT | AYSMI | YIRPSGGRTTYADSVKG | GGLLLWERELKSNYFDY |
| X81-B01 | nd | 0. 2 | RTSQFVNSNYLA | GASSRAT | QQSSRTPWT | HYLMT | YISPSGGHTIYADSVKG | VARGIAARSRTSYFDY |

Abbreviations used: “T/B” is the ELISA signal obtained using of the “target” (biotinylated plasma kallikrein) divided by the ELISA signal of the “background” (streptavidin); both of which were coated on microtiter plates, “nd” is not determined. The symbol “q” refers to the amber suppressible stop codon (TAG), which is translated as glutamine (Q) in strains of E. coli such as the TG1 cells that were used to express the Fab fragments.

[0932] Amino acid sequences of light chain (LC) and heavy chain (HC) variable domain of pKal antibody inhibitors are shown below.

| M6-D09 LC | |
|---|---|
| QDIQMTQSPS SLSASVGDRV TITCRASQSI RNYLNWYQQK PGKAPNLLIY AASTLQSGVP | 60 |
| ARFSGSGSGT DFTLTISSLQ PEDFATYYCQ QLSGYPHTFG QGTKLEIK | 108 |
| M6-D09 HC | |
| EVQLLESGGG LVQPGGSLRL SCAASGFTFS FYYMVWVRQA PGKGLEWVSV IYPSGGITVY | 60 |
| ADSVKGRFTI SRDNSKNTLY LQMNSLRAED TAVYYCARDK WAVMPPYYYY AMDVWGQGTT | 120 |
| VTVSSASTKG PSVFPLAPSS KS | 142 |
| M7-B04 LC | |
| QSALTQPASV SGSPGQSITI SCTGTNSDVG NYNLVSWYQQ HPGEAPKLLI YEVNKRPSGV | 60 |
| SNRFSGSKSG NTASLTISGL QAEDEADYLC CSYAGNRNFY VFGAGTKVTV L | 111 |
| M7-B04 HC | |
| EVQLLESGGG LVQPGGSLRL SCAASGFTFS WYSMVWVRQA PGKGLEWVSS ISPSGGLTNY | 60 |
| ADSVKGRFTI SRDNSKNTLY LQMNSLRAED TAVYYCARHT AARPFYYYYM DVWGKGTTVT | 120 |
| VSSASTKGPS VFPLAPSSKS | 140 |
| M7-E07 LC | |
| QSELTQPPSV SVSPGQTASI TCSGDKLGDK YACWYQQKPG QSPVLVIYQD SKRPSGIPER | 60 |
| FSGSNSGNTA TLTISGTQAM DEADYYCQAW DSSTGVFGGG TKLTVL | 106 |
| M7-E07 HC | |
| EVQLLESGGG LVQPGGSLRL SCAASGFTFS WYLMIWVRQA PGKGLEWVSY IYPSGGFTYY | 60 |
| ADSVKGRFTI SRDNSKNTLY LQMNSLRAED MAVYYCARTE GPLSWGYGMD VWGQGTTVTV | 120 |
| SSASTKGPSV FPLAPSSKS | 139 |
| M8-A09 LC | |
| QCELTQPPSE SVSPGQTANI TCSGDKLGNK YAYWYQQKPG QSPVLVIYQD NNRPSGIPER | 60 |
| FSGSNSGNTA TLTISGTQAI DEANYYCQAW DSRTWFGGG TKLTVL | 106 |
| M8-A09 HC | |
| EVQLLESGGG LVQPGGSLRL SCAASGFTFS TYFMLWVRQA PGKGLEWVSS IYPSGGNTVY | 60 |
| ADSVKGRFTI SRDNSKNTLY LQMNSLRAED TAVYYCARAA SPVRNYYYYG MDVWGQGTTV | 120 |
| TVSSASTKGP SVFPLAPSSK S | 141 |
| M10-F10 LC | |
| QDIQMTQSPS SLSASVGDRV TITCRASQSI SVYLNWYQHK PGKAPKLLIY GASNLQFGVP | 60 |
| SRFSGSGYGT DFTLTISSLQ PEDFATYHCQ QTFSLFTFGG GTKVEIK | 107 |
| M10-F10 HC | |
| EVQLLESGGG LVQPGGSLRL SCAASGFTFS FYNMNWVRQA PGKGLEWVSS ISPSGGETNY | 60 |
| ADSVKGRFTI SRDNSKNTLY LQMNSLRAED TAVYYCARGG GAYRNNWWGG FDIWGLGTMV | 120 |
| TVSSASTKGP SVFPLAPSSK S | 141 |
| M10-H05 LC | |
| QDIQMTQSPG TLSLSPGERA TLSCRASQSV SSSYLAWYQQ KPGQAPRLLI YGASSRATGI | 60 |
| PDRFSGSGSG TDFTLTISRL EPEDFAVYYC QQYGSSPFTF GPGTKVDIK | 109 |
| M10-H05 HC | |
| EVQLLESGGG LVQPGGSLRL SCAASGFTFS PYNMYWVRQA PGKGLEWVSS IRPSGGGTVY | 60 |
| ADSVKGRFTI SRDNSKNTLY LQMNSLRAED TAVYYCAGGF IAARWYYFDY WGQGTLVTVS | 120 |
| SASTKGPSVF PLAPSSKS | 138 |
| M12-D05 LC | |
| QSVLTQPPSV SVSPGQTATI TCSGDQLGDK YVGWYQQKPG QSPILVIYQD TKRPSGIPER | 60 |
| FSGSNSGNTA TLTISGTHTV DEAHYYCQAW DTSTAGFGGG TKLTVL | 106 |
| M12-D05 HC | |
| EVQLLESGGG LVQPGGSLRL SCAASGFTFS WYTMVWVRQA PGKGLEWVSR IYPSGGWTKY | 60 |
| ADSVKGRFTI SRDNSKNTLY LQMNSLRAED TATYYCAREG LLWFGENAFD IWGQGTMVTV | 120 |
| SSASTKGPSV FPLAPSSKS | 139 |
| M27-E05 LC | |
| QSELTQPPSV SVSPGQTASI TCSGDKLGDK YACWYQQKPG QSPVLVIYQD SKRPSGIPER | 60 |
| FSGSNSGNTA TLTISGTQAM DEADYYCQAW DSSTGVFGGG TKLTVL | 106 |
| M27-E05 HC | |
| EVQLLESGGG LVQPGGSLRL SCAASGFTFS WYLMIWVRQA PGKGLEWVSY IYPSGGFTYY | 60 |
| ADSVKGRFTI SRDNSKNTLY LQMNSLRAED MAVYYCARTE GPLSWGYGMD VWGQGTTVTV | 120 |
| SSASTKGPSV FPLAPSSKS | 139 |
| M28-B11 LC | |
| QSVLTQPPSV SVSPGQTATI TCSGDQLGDK YVGWYQQKPG QSPILVIYQD TKRPSGIPER | 60 |
| FSGSNSGNTA TLTISGTHTV DEAHYYCQAW DTSTAGFGGG TKLTVL | 106 |
| M28-B11 HC | |
| EVQLLESGGG LVQPGGSLRL SCAASGFTFS WYTMVWVRQA PGKGLEWVSR IYPSGGWTKY | 60 |
| ADSVKGRFTI SRDNSKNTLY LQMNSLRAED TATYYCAREG LLWFGENAFD IWGQGTMVTV | 120 |
| SSASTKGPSV FPLAPSSKS | 139 |
| M29-D09 LC | |
| QSALTQPPTV SVSPGQTARI TCSGNKLGDK YVAWYQQKPG QSPMLVIYQD TKRPSRVSER | 60 |
| FSGSNSANTA TLSISGTQAL DEADYYCQAW DSSIVIFGGG TRLTVL | 106 |
| M29-D09 HC | |
| EVQLLESGGG LVQPGGSLRL SCAASGFTFS WYTMVWVRQA PGKGLEWVSY IYPSGGATFY | 60 |
| ADSVKGRFTI SRDNSKNTLY LQMNSLRAED TAVYYCAMGS YDYIWGFYSD HWGQGTLVTV | 120 |
| SSASTKGPSV FPLAPSSKS | 139 |
| M29-E09 LC | |
| QYELTQPPSV SVSPGQTATI TCSGDNLGNK YNSWYQQKPG QSPLLVIYQD TKRPSAIPER | 60 |
| FSGSNSGNTA TLTISGTQAM DEADYYCQAW DGNWFGGGT KLTVL | 105 |
| M29-E09 HC | |
| EVQLLESGGG LVQPGGSLRL SCAASGFTFS WYEMGWVRQA PGKGLEWVSS IYSSGGGTMY | 60 |
| ADSVKGRFTI SRDNSKNTLY LQMNSLRAED TAVYYCARNP QYSGYDRSLS DGAFDIWGQG | 120 |
| TMVTVSSAST KGPSVFPLAP SSKS | 144 |
| M35-G04 LC | |
| QDIQMTQSPA TLSLSPGERA TLSCRASQSV SSYLAWYQQK PGQAPRLLIY DASNRATGIP | 60 |
| ARFSGSGSGT DFTLTISSLE PEDFAVYYCQ QRSNWPRGFT FGPGTKVDIK | 110 |
| M35-G04 HC | |
| EVQLLESGGG LVQPGGSLRL SCAASGFTFS YYHMSWVRQA PGKGLEWVSV ISPSGGSTKY | 60 |
| ADSVKGRFTI SRDNSKNTLY LQMNSLRAED TAVYYCARGG SSDYAWGSYR RPYYFDYWGQ | 120 |
| GTLVTVSSAS TKGPSVFPLA PSSKS | 145 |
| M38-F02 LC | |
| QSVLTQPPSV SVSPGQTASI YTCSGEKLGDK VSWYQQKPG QSPSLVICED SRRPSGIPER | 60 |
| FSGSNSGNTA TLTISGAQPM DDEADYYCQAW SSTAIFGPG TKVTVL | 106 |
| M38-F02 HC | |
| EVQLLESGGG LVQPGGSLRL SCAASGFTFS YYMMVWVRQA PGKGLEWVSY IYSSGGHTVY | 60 |
| ADSVKGRFTI SRDNSKNTLY LQMNSLRAED TAVYYCARDL FLYDFWSKGA FDIWGQGTMV | 120 |
| TVSSASTKGP SVFPLAPSSK S | 141 |
| M41-A11 LC | |
| QSVLTQPPSV SVSPGQTASI TCSGDKLGDK YTSWYQQRPG QSPVLVIYQD IKRPSGIPER | 60 |
| FSGSNSGNTA TLTISGTQAM DEADYYCQAW DSPNARVFGS GTKVTVL | 107 |
| M41-A11 HC | |
| EVQLLESGGG LVQPGGSLRL SCAASGFTFS HYRMSWVRQA PGKGLEWVSS IYPSGGRTVY | 60 |
| ADSVKGRFTI SRDNSKNTLY LQMNSLRAED TAVYYCAKDK FEWRLLFRGI GNDAFDIWGQ | 120 |
| GTMVTVSSAS TKGPSVFPLA PSSKS | 145 |
| M73-D06 LC | |
| QSELTQPPSA SETPGQRVTI SCSGSSSNIG SNTVSWFQQL PGSAPRLLIY NDHRRPSGVP | 60 |
| DRFSGSKSGT SASLVISGLQ SQDEADYYCS AWDDSLNGW FGGGTKLTVL | 110 |
| M73-D06 HC | |
| EVQLLESGGG LVQPGGSLRL SCAASGFTFS RYEMYWVRQA PGKGLEWVSS ISSSGGPTAY | 60 |
| ADSVKGRFTI SRDNSKNTLY LQMNSLRAED TAMYYCAKGT PKWELLLRSI YIENAFDIWG | 120 |
| QGTMVTVSSA STKGPSVFPL APSSKS | 146 |
| M76-D01 LC | |
| QDIVMTQTPP SLPVNPGEPA SISCRSSQSL SDDGNTYLDW YLQRPGQSPQ LLIHTLSYRA | 60 |
| SGVPDRFSGS GSGTDFTLKI SRVEAEDVGV YYCMQGTHWP PTFGQGTKVE IK | 112 |
| M76-D01 HC | |
| EVQLLESGGG LVQPGGSLRL SCAASGFTFS FYAMHWVRQA PGKGLEWVSG IVPSGGRTHY | 60 |
| ADSVKGRFTI SRDNSKNTLY LQMNSLRAED TAVYYCATDS SGSPNPLFDY WGQGTLVTVS | 120 |
| SASTKGPSVF PLAPSPKS | 138 |
| M110-C12 LC | |
| QDIQMTQSPL SLSVTPGEPA SISCRSSLSL LHSNGYNYLD WYVQRPGQSP QLLMYLSSTR | 60 |
| ASGVPDRFSG SGSGTDFTLE ISRVEAEDVG VYYCMQPLET PPTFGGGTKV EIK | 113 |
| M110-C12 HC | |
| EVQLLESGGG LVQPGGSLRL SCAASGFTFS YYEMDWVRQA PGKGLEWVSG ISSSGGHTAY | 60 |
| ADSVKGRFTI SRDNSKNTLY LQMNSLRAED TATYYCARER RSSSRARYYY GMDVWGQGTT | 120 |
| VTVSSASTKG PSVFPLAPSS KS | 142 |
| M137-E12 LC | |
| QSVLIQPPSV SGIPGQRVTI SCSGNNSNFG SNTVTWYQQL PGTAPKLLIY SDSRRPSGVP | 60 |
| DRFSGSRSDT SASLAISGLQ SEDEAEYHCA AWDDSLNGVF GGGTKLTVL | 109 |
| M137-E12 HC | |
| EVQLLESGGG LVQPGGSLRL SCAASGFTFS DYRMQWVRQA PGKGLEWVSV IVPSGGNTMY | 60 |
| ADSVKGRFTI SRDNSKNTLY LQMNSLRAED TAVYYCARGG PGSSIAARRA PTGYYGMDVW | 120 |
| GQGTTVTVSS ASTKGPSVFP LAPSSKS | 147 |
| M142-H08 LC | |
| QDIQMTQSPS SLSAFVGDRV TITCRASQPI DNYLNWYHQK PGKAPKLLIY AASRLQSGVP | 60 |
| SRLSGSGFGT DFTLTISSLQ PEDFGNYYCQ QSYTVPYTFG GGTKVEIR | 108 |
| M142-H08 HC | |
| EVQLLESGGG LVQPGGSLRL SCAASGFTFS AYSMIWVRQA PGKGLEWVSY IRPSGGRTTY | 60 |
| ADSVKGRFTI SRDNSKNTLY LQMNSLRAED TAVYYCARGG LLLWFRELKS NYFDYWGQGT | 120 |
| LVTVSSASTK GPSVFPLAPS SKS | 143 |
| M145-D01 LC | |
| QDIQMTQSPA TLSLSPGERA TLSCRASQSV SSYLAWYQQK PGQAPRLLIY DASNRATGIP | 60 |
| ARFSGSGSGT DFTLTISSLE PEDFAVYYCQ QRSNWPRGFT FGPGTKVDIK | 110 |
| M145-D01 HC | |
| EVQLLESGGG LVQPGGSLRL SCAASGFTFS YYHMSWVRQA PGKGLEWVSV ISPSGGSTKY | 60 |
| ADSVKGRFTI SRDNSKNTLY LQMNSLRAED TAVYYCARGG SSDYAWGSYR RPYYFDYWGQ | 120 |
| GTLVTVSSAS TKGPSVFPLA PSSKS | 145 |
| M145-D11 LC | |
| QSVLTQPPSV SVSPGQTASI TCSGDKLGDK YTSWYQQRPG QSPVLVIYQD IKRPSGIPER | 60 |
| FSGSNSGNTA TLTISGTQAM DEADYYCQAW DSPNARVFGS GTKVTVL | 107 |
| M145-D11 HC | |
| EVQLLESGGG LVQPGGSLRL SCAASGFTFS HYRMSWVRQA PGKGLEWVSS IYPSGGRTVY | 60 |
| ADSVKGRFTI SRDNSKNTLY LQMNSLRAED TAVYYCAKDK FEWRLLFRGI GNDAFDIWGQ | 120 |
| GTMVTVSSAS TKGPSVFPLA PSSKS | 145 |
| M146-E12 LC | |
| QDIQMTQSPS SLSASVGDRV TITCRASGDI GNALGWYQQK PGKAPRLLIS DASTLQSGVP | 60 |
| LRFSGSGSGT EFTLTISSLQ PEDFATYYCL QGYNYPRTFG QGTKLEIR | 108 |
| M146-E12 HC | |
| EVQLLESGGG LVQPGGSLRL SCAASGFTFS RYIMHWVRQA PGKGLEWVSS ISPSGGLTSY | 60 |
| ADSVKGRFTI SRDNSKNTLY LQMNSLRAED TAVYYCAREF ENAYHYYYYG MDVWGQGTTV | 120 |
| TVSSASTKGP SVFPLAPSSK S | 141 |
| M152-A12 LC | |
| QDIQMTQSPS SLSASVGDRV TITCRASQSI SSYLSWYQQR PGKAPNLLIY AASSLQSGVP | 60 |
| SRFSGSGSGT DFTLTISSLQ PEDFATYYCQ QSISIPRTFG QGTKVEVK | 108 |
| M152-A12 HC | |
| EVQLLESGGG LVQPGGSLRL SCAASGFTFS PYFMGWVRQA PGKGLEWVSG IGPSGGSTTY | 60 |
| ADSVKGRFTI SRDNSKNTLY LQMNSLRAED TAVYYCAREG PPYSSGWYRG LRQYHFDYWG | 120 |
| QGTLVTVSSA STKGPSVFPL APSSKS | 146 |
| M160-G12 LC | |
| QDIQMTQSPS FLSASVGDRV TITCRASQGI SSYLAWYQQK PGKAPKLLIY AASTLQSGVP | 60 |
| SRFSGSGSGT EFTLTISSLQ PEDFATYYCQ QLNSYPLTFG GGTKVEIK | 108 |
| M160-G12 HC | |
| EVQLLESGGG LVQPGGSLRL SCAASGFTFS HYLMTWVRQA PGKGLEWVSY ISPSGGHTIY | 60 |
| ADSVKGRFTI SRDNSKNTLY LQMNSLRAED TAVYYCARVA RGIAARSRTS YFDYWGQGTL | 120 |
| VTVSSASTKG PSVFPLAPSS KS | 142 |
| M161-C11 LC | |
| QSALTQPPSV SVSPGQTASI TCSGDKLGDK YVSWYQQRPG QSPVLVIYQD TKRPSGIPER | 60 |
| FSGSNSGNTA TLTISGTQAV DEADYYCQAW DSSTYVFGGG TKVTVL | 106 |
| M161-C11 HC | |
| EVQLLESGGG LVQPGGSLRL SCAASGFTFS DYAMKWVRQA PGKGLEWVSS ISSSGGVTQY | 60 |
| ADSVKGRFTI SRDNSKNTLY LQMNSLRAED TAVYYCAREE DYSSSWYSRR FDYYYGMDVW | 120 |
| GQGTTVTVSS ASTKGPSVFP LAPSSKS | 147 |
| M162-A04 LC | |
| QDIQMTQSPS TLSASVGDRV TITCRASQSI SSWLAWYQQK PGKAPNLLIY KASTLESGVP | 60 |
| SRFSGSGSGT EFTLTISSLQ PDDFATYYCQ QYNTYWTFGQ GTKVEIK | 107 |
| M162-A04 HC | |
| EVQLLESGGG LVQPGGSLRL SCAASGFTFS HYIMMWVRQA PGKGLEWVSG IYSSGGITVY | 60 |
| ADSVKGRFTI SRDNSKNTLY LQMNSLRAED TAVYYCAYRR TGIPRRDAFD IWGQGTMVTV | 120 |
| SSASTKGPSV FPLAPSSKS | 139 |
| X67-B03 LC | |
| QDIQMTQSPS SLSAFVGDRV TITCRASQPI DNYLNWYHQK PGKAPKLLIY AASRLQSGVP | 60 |
| SRLSGSGFGT DFTLTISSLQ PEDFGNYYCQ QSYTVPYTFG GGTKVEIR | 108 |
| X67-B03 HC | |
| EVQLLESGGG LVQPGGSLRL SCAASGFTFS AYSMIWVRQA PGKGLEWVSY IRPSGGRTTY | 60 |
| ADSVKGRFTI SRDNSKNTLY LQMNSLRAED TAVYYCARGG LLLWSRELKS NYFDYWGQGT | 120 |
| LVTVSSASTK GPSVFPLAPS SKS | 143 |
| X67-C03 LC | |
| QDIQMTQSPS SLSAFVGDRV TITCRASQPI DNYLNWYHQK PGKAPKLLIY AASRLQSGVP | 60 |
| SRLSGSGFGT DFTLTISSLQ PEDFGNYYCQ QSYTVPYTFG GGTKVEIR | 108 |
| X67-C03 HC | |
| EVQLLESGGG LVQPGGSLRL SCAASGFTFS AYSMIWVRQA PGKGLEWVSY IRPSGGRTTY | 60 |
| ADSVKGRFTI SRDNSKNTLY LQMNSLRAED TAVYYCARGG LLLWMRELKS NYFDYWGQGT | 120 |
| LVTVSSASTK GPSVFPLAPS SKS | 143 |
| X67-C09 LC | |
| QDIQMTQSPS SLSAFVGDRV TITCRASQPI DNYLNWYHQK PGKAPKLLIY AASRLQSGVP | 60 |
| SRLSGSGFGT DFTLTISSLQ PEDFGNYYCQ QSYTVPYTFG GGTKVEIR | 108 |
| X67-C09 HC | |
| EVQLLESGGG LVQPGGSLRL SCAASGFTFS AYSMIWVRQA PGKGLEWVSY IRPSGGRTTY | 60 |
| ADSVKGRFTI SRDNSKNTLY LQMNSLRAED TAVYYCARGG LLLWGRELKS NYFDYWGQGT | 120 |
| LVTVSSASTK GPSVFPLAPS SKS | 143 |
| X67-D03 LC | |
| QDIQMTQSPS SLSAFVGDRV TITCRASQPI DNYLNWYHQK PGKAPKLLIY AASRLQSGVP | 60 |
| SRLSGSGFGT DFTLTISSLQ PEDFGNYYCQ QSYTVPYTFG GGTKVEIR | 108 |
| X67-D03 HC | |
| EVQLLESGGG LVQPGGSLRL SCAASGFTFS AYSMIWVRQA PGKGLEWVSY IRPSGGRTTY | 60 |
| ADSVKGRFTI SRDNSKNTLY LQMNSLRAED TAVYYCARGG LLLWNRELKS NYFDYWGQGT | 120 |
| LVTVSSASTK GPSVFPLAPS SKS | 143 |
| X67-E04 LC | |
| QDIQMTQSPS SLSAFVGDRV TITCRASQPI DNYLNWYHQK PGKAPKLLIY AASRLQSGVP | 60 |
| SRLSGSGFGT DFTLTISSLQ PEDFGNYYCQ QSYTVPYTFG GGTKVEIR | 108 |
| X67-E04 HC | |
| EVQLLESGGG LVQPGGSLRL SCAASGFTFS AYSMIWVRQA PGKGLEWVSY IRPSGGRTTY | 60 |
| ADSVKGRFTI SRDNSKNTLY LQMNSLRAED TAVYYCARGG LLLWDRELKS NYFDYWGQGT | 120 |
| LVTVSSASTK GPSVFPLAPS SKS | 143 |
| X67-F01 LC | |
| QDIQMTQSPS SLSAFVGDRV TITCRASQPI DNYLNWYHQK PGKAPKLLIY AASRLQSGVP | 60 |
| SRLSGSGFGT DFTLTISSLQ PEDFGNYYCQ QSYTVPYTFG GGTKVEIR | 108 |
| X67-F01 HC | |
| EVQLLESGGG LVQPGGSLRL SCAASGFTFS AYSMIWVRQA PGKGLEWVSY IRPSGGRTTY | 60 |
| ADSVKGRFTI SRDNSKNTLY LQMNSLRAED TAVYYCARGG LLLWQRELKS NYFDYWGQGT | 120 |
| LVTVSSASTK GPSVFPLAPS SKS | 143 |
| X67-F10 LC | |
| QDIQMTQSPS SLSAFVGDRV TITCRASQPI DNYLNWYHQK PGKAPKLLIY AASRLQSGVP | 60 |
| SRLSGSGFGT DFTLTISSLQ PEDFGNYYCQ QSYTVPYTFG GGTKVEIR | 108 |
| X67-F10 HC | |
| EVQLLESGGG LVQPGGSLRL SCAASGFTFS AYSMIWVRQA PGKGLEWVSY IRPSGGRTTY | 60 |
| ADSVKGRFTI SRDNSKNTLY LQMNSLRAED TAVYYCARGG LLLWTRELKS NYFDYWGQGT | 120 |
| LVTVSSASTK GPSVFPLAPS SKS | 143 |
| X67-G04 LC | |
| QDIQMTQSPS SLSAFVGDRV TITCRASQPI DNYLNWYHQK PGKAPKLLIY AASRLQSGVP | 60 |
| SRLSGSGFGT DFTLTISSLQ PEDFGNYYCQ QSYTVPYTFG GGTKVEIR | 108 |
| X67-G04 HC | |
| EVQLLESGGG LVQPGGSLRL SCAASGFTFS AYSMIWVRQA PGKGLEWVSY IRPSGGRTTY | 60 |
| ADSVKGRFTI SRDNSKNTLY LQMNSLRAED TAVYYCARGG LLLWARELKS NYFDYWGQGT | 120 |
| LVTVSSASTK GPSVFPLAPS SKS | 143 |
| X67-H04 LC | |
| QDIQMTQSPS SLSAFVGDRV TITCRASQPI DNYLNWYHQK PGKAPKLLIY AASRLQSGVP | 60 |
| SRLSGSGFGT DFTLTISSLQ PEDFGNYYCQ QSYTVPYTFG GGTKVEIR | 108 |
| X67-H04 HC | |
| EVQLLESGGG LVQPGGSLRL SCAASGFTFS AYSMIWVRQA PGKGLEWVSY IRPSGGRTTY | 60 |
| ADSVKGRFTI SRDNSKNTLY LQMNSLRAED TAVYYCARGG LLLWERELKS NYFDYWGQGT | 120 |
| LVTVSSASTK GPSVFPLAPS SKS | 143 |

Note:
X81-B01 is a germilined IgG derived from X63-G06 which is shown in Table 7.

TABLE 2
CDR Amino Acid Sequences and ELISA Signal of Antibody Binders of PKal

| | Human | | | | | | |
|---|---|---|---|---|---|---|---|
| | pKal | | | | | | |
| Initial | ELISA | | | | HV- | | |
| Name | (T/B) | LV-CDR1 | LV-CDR2 | LV-CDR3 | CDR1 | HV-CDR2 | HV-CDR3 |
| M6-A06 | 11.7 | RASQSISMYLN | GTSSLQS | QQSYSAPWT | LYQMT | GIWPSGGFTDYADSVKG | VSTAVADNDY |
| M6-A08 | 23.4 | RASQRISFYLN | GASSLQS | QQTFSTPNT | PYPMQ | SISSSGGMTEYADSVKG | DDYGGKGGAFDI |
| M6-D03 | 15.5 | RASQSISSYLN | AASSLQS | QQSYSTLWT | KYFMG | VIGSSGGWTSYADSVKG | VSTAVADNDY |
| M6-D08 | 16 | RASQSISSYLN | GASSLQS | QQSYTRWT | RYHMV | SISPSGGWTNYADSVKG | EMATIAGQFDP |
| M6-G05 | 18.5 | RASQSISTYLN | NAFSMER | QQSYTTPTT | RYRMV | SIYPSGGMTAYADSVKG | DAVGIGDAFDI |
| M8-C04 | 44.7 | SGDKLGDKYTS | QDSKRPS | QAWDSSTV | YYPMQ | YIYPSGGLTSYADSVKG | LFYGSGSVGFEY |
| M8-D05 | 11.9 | RASQDISSWLV | DASNLQS | QQADGFPLT | LYNMN | SISPSGGFTDYADSVKG | DLDLGILDY |
| M8-E06 | 8.8 | RASQSISSYLN | AASSLQS | QQSYSTLMYT | HYFMT | SIVPSGGMTQYADSVKG | DSYSSSWFDI |
| M8-G09 | 28.2 | RASQGVSYYLA | GASSLQS | QQYNTYPPT | LYEML | VIYPSGGYTDYADSVKG | SFSGFGEIDY |
| M8-H04 | 3.3 | RASQYISTYLN | GTSSLQS | QQSFTTPFT | GYWMG | SISSSGGWTQYADSVKG | DDEIAAGGAFDI |
| M9-A03 | 14.4 | RASQNIDIYLN | GAYNLQS | QQSYGTPV | GYFMM | SIYSSGGYTDYADSVKG | EVAGTYAFDI |
| M9-A08 | 5.5 | RASQRISTYLN | GASSLQS | QQSYNTPRT | AYEMW | YIGSSGGSTSYADSVKG | GNSSSFDAFDI |
| M9-C08 | 10.9 | RASQSISIYVN | AASSLQR | QQSFSTPLT | HYGMV | YIVPSGGLTYYADSVKG | VDYTGDGLGY |
| M9-C10 | 7.8 | RASQGISSYLN | GASSLQS | QESYSTLFT | LYPMQ | SIGSSGGMTFYADSVKG | EVGAAGFAFDI |
| M9-D08 | 35.9 | RASRTISFYLN | GGSSLHS | QQSFSSPWT | WYKMM | SIYPSGGWTNYADSVKG | GSPWGDDAFDI |
| M9-E04 | 18.8 | RASQSISGYLN | AASNLQT | QQSHTPPKT | EYDMM | SIGSSGGMTYYADSVKG | DQVAAAAIDY |
| M9-F08 | 10.9 | RASQSISSYLN | AASSLQS | QQSYSTPPYT | PYAMT | VIYPSGGFTDYADSVKG | ASGSYLDAFDI |
| M9-F09 | 7 | RASQSISSYLN | AASSLQS | QQTYTTPWT | SYPMG | RISSSGGMTIYADSVKG | DDWNVGMDV |
| M9-F10 | 8.4 | RASQSINTYLN | AASTLES | QQSYSTPYT | DYDME | SISPSGGSTIYADSVKG | QGLLTAFDI |
| M9-G08 | 4.8 | RASQSISSYLN | AASSLQS | QQSYSTPIT | YYTML | SIYPSGGFTMYADSVKG | VDTAMAMIDY |
| M9-H02 | 3.5 | RASRSIATYLN | GASTLQS | QQSFSDPYT | AYMMI | VIYPSGGVTMYADSVKG | GTVGASDAFDI |
| M9-H03 | 4.4 | SGDKLGNRYTS | QDNKRPS | QALDSNTYV | WYSMG | YIVPSGGYTMYADSVKG | DPGVSYYYYGMDV |
| M9-H04 | 16.1 | RASQSISSYLN | AASSLQS | QQSYSTPPT | AYTMW | SIWPSGGSTFYADSVKG | TYDSSAGEVDY |
| M10-A03 | 33.7 | RASQRISFYLN | GASSLQS | QQTFSTPNT | PYPMQ | SISSSGGMTEYADSVKG | DDYGGKGGAFDI |
| M10-A12 | 20.8 | RASRDISVYLN | GASSLQS | QQSYSIPFT | LYLMH | SIYSSGGFTTYADSVKG | DTDYGMDV |
| M10-B09 | 14.1 | RASQSISTYLN | GASSLQS | QQSFSTPWT | WYEMS | RIWPSGGVTMYADSVKG | TSITTVGMDV |
| M10-C11 | 5.3 | RASQSISIYLN | AASTLQS | QQSHSIPPT | MYPMM | YISPSGGMTDYADSVKG | VAGSSDAFDI |
| M10-D11 | 6.4 | RSSQSLLHSNGYNYLD | LGSNRAS | MQALQTPLT | AYPMN | RISSSGGNTSYADSVKG | GYLGY |
| M10-E06 | 32.8 | RASQSISTYLN | GASSLQS | QQSYSDPYT | LYRMF | SIWSSGGPTMYADSVKG | EYPSTYYFDY |
| M10-F09 | 4.8 | RASQTIDDDLI | AASSLQS | QQSYNIPRT | NYDMM | YISPSGGFTRYADSVKG | DIYYYNWGPSHYFDS |
| M10-G09 | 7.1 | RASQSISGYIN | AASSLQS | QQYVSYPFT | QYGMQ | SIRSSGGATRYADSVKG | DGYYDSSGYPDY |
| Ml1-A10 | 25 | RASQSIDTYLN | DASNL | QHYLYAPYS | NYWMM | GIGSSGGFTSYADSVKG | GSYSDYGVFES |
| M11-E01 | 11.7 | RASQSISSYLN | AASSLQS | QQSYSTPPT | TYEMY | GIGSSGGMTMYADSVKG | EQPGIAALQF |
| M11-E04 | 43.2 | RASQSISIYLT | GAATLQT | QQTFSLPRT | MYHMN | GIVSSGGVTFYADSVKG | ITTVTTGGAFDI |
| M11-E05 | 41.4 | RTSQTINNYLN | ATHTLES | QQSFAFPYT | WYTMG | WIYFGGLTTYADSVKG | LGGPLDAFDI |
| M11-E06 | 12.6 | RASRGIGTYLN | AASSLET | QESFTNVYN | QYAMH | SIYPSGGFTLYADSVKG | GGWLAGGELLN |
| M11-G09 | 23.6 | RTSQGINHYLN | AASELQT | QQTYTSPYT | LYNMT | YIYPSGGGTHYADSVKG | DTGFWSADAFDI |
| M11-G12 | 4.9 | RASQTISVYVN | GASSLQS | QQSYSIPFT | QYPMN | SISSSGGFTTYADSVKG | EEQQGGFDY |
| M12-A08 | 40.4 | RASQSISRYLN | AASTLET | QQSYSTPYT | WYYMG | WIVSSGGLTLYADSVKG | TTVTTGDAFDI |
| M12-B04 | 18 | RASQGIRNDLG | AASILQS | LQDYEYPLT | LYSMY | RIRPSGGGTVYADSVKG | DPLYSSGDV |
| M12-C09 | 7 | RASQSIGIYLN | GASSLQS | QHSYSTPFT | SYAMV | SIGSSGGFTLYADSVKG | MNLGGGDAFDI |
| M12-C10 | 8.3 | SGDKLGEKYVS | QDNKRPS | QAWDSYTW | DYEMH | GISPSGGKTQYADSVKG | DLKWGGRGSPDWYFDL |
| M12-D10 | 9.9 | RASQSISSYLN | AASSLQS | QQSYSTPPT | NYPMD | SISSSGGWTNYADSVKG | DTSGSYLGFDY |
| M12-E06 | 48 | RASQSISTYLN | GAFSLQS | QQSHSTPPT | QYKML | GIGPSGGLTAYADSVKG | APWFGELGMDV |
| M27-A10 | 3.2 | RASQSISAYLN | YGVGSLQS | QQGYTTPVT | WYRMD | SIWPSGGLTSYADSVKG | GWAPGGDAFDI |
| M27-B01 | 33.1 | RASQSISSYLN | AASSLQS | QQSYSTPYT | DYTMW | SISSSGGITFYADSVKG | SADTAMGGAFDI |
| M27-B12 | 2.3 | SGDKLGDEYAA | QDRKRPS | QAWGKRNW | WYQMM | SISPSGGITEYADSVKG | DRSSGWYYYGMDV |
| M27-E03 | 35.9 | RASQSISSYLN | AASSLQS | QQSYSTPRT | SYMMH | GIYPSGGWTDYADSVKG | LVAGLDAFDI |
| M27-F04 | 10.5 | RASQSISSYLN | AASSLQS | QQSYSTPPT | WYPMT | SIGPSGGQTIYADSVKG | EYGDYGGGFDP |
| M27-F11 | 10 | RASQGISSYLA | AASSLQS | QQSYNTLRT | SYHMM | SIYPSGGATMYADSVKG | DGYHYGDYTYFQH |
| M27-G01 | 31.4 | RASQSISTYLN | GASSLQS | QQSYSDPYT | LYRMF | SIWSSGGPTMYADSVKG | EYPSTYYFDY |
| M27-G04 | 4.1 | RASQRISYYLT | AASSLES | QQAFSTPFT | AYYMV | YISPSGGQTQYADSVKG | EAISSSSFDY |
| M27-G09 | 2.2 | RTRQSISNYLN | AASSLQS | QQSYDIPFT | EYDMA | YIVSSGGFTSYADSVKG | WAGWIAAADY |
| M27-H10 | 12.4 | RASQSISNYLN | AASSLQS | QQSYSTPQT | AYQMA | VIYSSGGYTDYADSVKG | HNWNDGAFDI |
| M28-A01 | 19 | RASQSISSYLN | AASSLQS | QQSYSTLT | WYAMH | GIYSSGGYTKYADSVKG | DLSNGDDVFDI |
| M28-C03 | 2.2 | RASQSINFYLN | VASSLES | LQSYSAPYT | YYQMG | SIYPSGGMTDYADSVKG | GSPWGDDAFDI |
| M28-D02 | 3.7 | RTSRRIGTYLN | GASSLQS | QQSFSSPWT | WYPMQ | YIYPSGGGTDYADSVKG | SSGWLGDAFDI |
| M28-D12 | 41.6 | RASQSIATYLN | AASSLQS | QQSYSTRET | WYTMH | VIYPSGGPTSYADSVKG | DGSGSYLGFDY |
| M28-E01 | 41 | RASQSISSYLN | AASSLQS | QQTYTTPWT | SYPMG | RISSSGGMTIYADSVKG | DDWNVGMDV |
| M28-E11 | 29.3 | RASQDISNWLA | AASSLQT | QQSYSLPWT | LYDMT | GISSSGGVTIYADSVKG | TYYYDSSGYADAFDI |
| M28-F01 | 1.5 | RASQSINTYLN | AASTLES | QQSYSTPPT | VYLMH | GISPSGGYTQYADSVKG | PGGLDAFDI |
| M28-F05 | 31.4 | RASQSISSYLN | AASSLQS | QQSYSTPLT | RYIMW | GIYSSGGYTQYADSVKG | ELEGLGGFDY |
| M28-F07 | 33 | RASQGISSWLA | ATSGLQS | QQAKSFPLT | DYTMY | SIVPSGGHTLYADSVKG | DHLSSWYGGFFDY |
| M29-C07 | 5.2 | RASQSISSYLN | AASSLQS | QQSYSTRYT | GYDMM | VISSSGGNTAYADSVKG | ESSGLYYFDY |
| M29-D10 | 23.6 | RASQSITIYLN | GASNLHS | QQSYDTPLT | WYPMY | SIGSSGGPTPYADSVKG | WADYGGSLDY |
| M29-E02 | 2 | SGSSSNIGNNAVS | YDDLLPS | AAWDDSLNGFV | RYPMM | VIYPSGGDTFYADSVKG | GDDYLWEAAVY |
| M29-G08 | 40.4 | RASQNIGNDVA | HASTRAY | QQFYDWPAHT | YYHMW | GISPSGGFTFYADSVKG | DYYYDSSGYSPLGY |
| M29-G10 | 16.4 | RASQSISIYLN | GASQLES | QQSYNVPYT | FYKMI | SISSSGGSTQYADSVKG | DRVDLGYLDY |
| M74-A07 | 8.6 | RTSQNINTYLN | GVSSLHR | QQSYSSPWT | QYLMM | SIYPSGGYTSYADSVKG | VSTAVADNDY |
| M76-F02 | 6.4 | RASQTIDNYLH | DASSLQS | QQSYDTPQYT | LYDMN | GISPSGGQTMYADSVKG | QPMISAFDI |
| M76-G02 | 10.3 | RASQSISSYLN | AASSLQS | QQSYSTPPWT | LYAMW | YISSSGGFTSYADSVKG | YRVGVAATDY |
| M76-G06 | 11.8 | RASQSISTYLN | AASSLQS | QQSYSTPHT | GYIMH | WIYPSGGWTEYADSVKG | DAPGVGAIDY |
| M76-H02 | 13.4 | RASQDISVYLN | GGASLQS | QQSYSLPFT | MYWMQ | YIYPSGGPTKYADSVKG | PSGSYGDAFDI |
| M77-C07 | 16.1 | RASQNISSYLN | AASSLQS | QQSYSTPRT | LYIMG | GIYPSGGFTMYADSVKG | ESSGVAAPDY |
| M77-H04 | 7.6 | RSSQSLLHSRGYNYLD | LGSNRAS | MQALQRRT | YYTMI | GIRSSGGGTRYADSVKG | DGSRYSYGSIYYYYGMDA |

Abbreviations used: “T/B” is the ELISA signal obtained using of the “target” (biotinylated plasma kallikrein) divided by the ELISA signal of the “background” (streptavidin); both of which were coated on microtiter plates, “nd” is not determined. The symbol “q” refers to the amber suppressible stop codon (TAG), which is translated as glutamine (Q) in strains of E. coli such as the TG1 cells that were used to express the Fab fragments.

[0933] Amino acid sequences of light chain (LC) and heavy chain (HC) variable domain of pKal antibody binders are shown below.

| M6-A06 LC | |
|---|---|
| QDIQMTQSPS SLSASVGDSV TISCRASQSI SMYLNWYQHK PGKAPKLLIY GTSSLQSGVP | 60 |
| SRFSGSGPGG TDFTLTISSL QPEDFATYYC QQSYSAPWTF GQGTKVEIK | 109 |
| M6-A06 HC | |
| EVQLLESGGG LVQPGGSLRL SCAASGFTFS LYQMTWVRQA PGKGLEWVSG IWPSGGFTDY | 60 |
| ADSVKGRFTI SRDNSKNTLY LQMNSLRAED AVYYCARVS TAVADNDYWG QGTLVTVSSA | 120 |
| STKGPSVFPL APSSKS | 136 |
| M6-A08 LC | |
| QDIQMTQSPS SLSASVGDRV TITCRASQRI SFYLNWFQQK PGKAPNLLIY GASSLQSGVP | 60 |
| SRFSGSGSGT DFTLTISSLQ PKDFGTYYCQ QTFSTPNTFG QGTKLEIK | 108 |
| M6-A08 HC | |
| EVQLLESGGG LVQPGGSLRL SCAASGFTFS PYPMQWVRQA PGKGLEWVSS ISSSGGMTEY | 60 |
| ADSVKGRFTI SRDNSKNTLY LQMNSLRAED TAVYYCARDD YGGKGGAFDI WGQGTMVTVS | 120 |
| SASTKGPSVF PLAPSSKS | 138 |
| M6-D03 LC | |
| QDIQMTQSPS SLSASVGDRV TITCRASQSI SSYLNWYQQK PGKAPKLLIY AASSLQSGVP | 60 |
| SRFSGSGSGT DFTLTISSLQ PEDFATYYCQ QSYSTLWTFG QGTKVEIK | 108 |
| M6-D03 HC | |
| EVQLLESGGG LVQPGGSLRL SCAASGFTFS KYFMGWVRQA PGKGLEWVSV IGSSGGWTSY | 60 |
| ADSVKGRFTI SRDNSKNTLY LQMNSLRAED TAVYYCARVS TAVADNDYWG QGTLVTVSSA | 120 |
| STKGPSVFPL APSSKS | 136 |
| M6-D08 LC | |
| QDIQMTQSPS SLSASVGDRV TITCRASQSI SSYLNWYqQK PGKAPKLLIY GASSLQSGVP | 60 |
| SRFSGSGSGT DFTLTISSLQ PEDSATYYCQ QSYTRWTFGQ GTKVEIK | 107 |
| M6-D08 HC | |
| EVQLLESGGG LVQPGGSLRL SCAASGFTFS RYHMVWVRQA PGKGLEWVSS ISPSGGWTNY | 60 |
| ADSVKGRFTI SRDNSKNTLY LQMNSLRAED TAMYYCAREM ATIAGQFDPW GQGTLVTVSS | 120 |
| ASTKGPSVFP LAPSSKS | 137 |
| M6-G05 LC | |
| QDIQMTQSPS SLSASVGDRV TITCRASQSI STYLNWYQLK PGKAPKLLIY NAFSMERGVP | 60 |
| STISGSGSGT DFTLTISSLQ PEDFATYYCQ QSYTTPTTFG QGTKVEIK | 108 |
| M6-G05 HC | |
| EVQLLESGGG LVQPGGSLRL SCAASGFTFS RYRMVWVRQA PGKGLEWVSS IYPSGGMTAY | 60 |
| ADSVKGRFTI SRDNSKNTLY LQMNSLRAED TAVYYCARDA VGIGDAFDIW GQGTMVTVSS | 120 |
| ASTKGPSVFP LAPSSKS | 137 |
| M8-C04 LC | |
| QSALTQPPSV SVSPGQTASI TCSGDKLGDK YTSWHQQKPG QSPVLVIYQD SKRPSGIPER | 60 |
| FSGSNSGNTA TLTISGTQAM DEADYYCQAW DSSTVFGGGT RLTVL | 105 |
| M8-C04 HC | |
| EVQLLESGGG LVQPGGSLRL SCAASGFTFS YYPMQWVRQA PGKGLEWVSY IYPSGGLTSY | 60 |
| ADSVKGRFTI SRDNSKNTLY LQMNSLRAED TAVYYCARLF YGSGSVGFEY WGQGTLVTVS | 120 |
| SASTKGPSVF PLAPSSKS | 138 |
| M8-D05 LC | |
| QDIQMTQSPS FVSASVGDRV TITCRASQDI SSWLVWYQQK PGKGPKLLIY DASNLQSGVP | 60 |
| SRFSGGGSGT HFTLTISSLQ PEDFATYYCQ QADGFPLTFG GGTKVEMK | 108 |
| M8-D05 HC | |
| EVQLLESGGG LVQPGGSLRL SCAASGFTFS LYNMNWVRQA PGKGLEWVSS ISPSGGFTDY | 60 |
| ADSVKGRFTI SRDNSKNTLY LQMNSLRAED TAVYYCARDL DLGILDYWGQ GTLVTVSSAS | 120 |
| TKGPSVFPLA PSSKS | 135 |
| M8-E06 LC | |
| QDIQMTQSPS SLSASVGDRV TITCRASQSI SSYLNWYQQK PGKAPKLLIY AASSLQSGVP | 60 |
| SRFSGSGSGT DFTLTISSLQ PEDFATYYCQ QSYSTLMYTF GQGTKLEIK | 109 |
| M8-E06 HC | |
| EVQLLESGGG LVQPGGSLRL SCAASGFTFS HYFMTWVRQA PGKGLEWVSS IVPSGGMTQY | 60 |
| ADSVKGRFTI SRDNSKNTLY LQMNSLRAED TAVYYCARDS YSSSWFDIWG QGTMVTVSSA | 120 |
| STKGPSVFPL APSSKS | 136 |
| M8-G09 LC | |
| QDIQMTQSPS SLSASVGDTV TITCRASQGV SYYLAWFQQK PGKAPKSLIY GASSLQSGVP | 60 |
| SKFSGSGSGT VFTLTISSLQ PDDFATYYCQ QYNTYPPTFG QGTRLDIK | 108 |
| M8-G09 HC | |
| EVQLLESGGG LVQPGGSLRL SCAASGFTFS LYEMLWVRQA PGKGLEWVSV IYPSGGYTDY | 60 |
| ADSVKGRFTI SRDNSKNTLY LQMNSLRAED MAVYYCARSF SGFGEIDYWG QGTLVTVSSA | 120 |
| STKGPSVFPL APSSKS | 136 |
| M8-H04 LC | |
| QDIQMTQSPS SLSASIGDRV TITCRASQYI STYLNWYEQK PGKAPKLLIY GTSSLQSGVP | 60 |
| SRFSGSGSGT EFSLTISSLQ PEDFATYYCQ QSFTTPFTFG QGTKLEIK | 108 |
| M8-H04 HC | |
| EVQLLESGGG LVQPGGSLRL SCAASGFTFS GYWMGWVRQA PGKGLEWVSS ISSSGGWTQY | 60 |
| ADSVKGRFTI SRDNSKNTLY LQMNSLRAED TATYYCARDD EIAAGGAFDI WGQGAMVTVS | 120 |
| SASTKGPSVF PLAPSSKS | 138 |
| M9-A03 LC | |
| QDIQMTQSPS SLSASLGDRV TITCRASQNI DIYLNWYQQT PGKAPKLLIY GAYNLQSGVP | 60 |
| SRFSGSGSGT DFTLTISSLQ PEDFGTYYCQ QSYGTPVFGQ GTKLEIK | 107 |
| M9-A03 HC | |
| EVQLLESGGG LVQPGGSLRL SCAASGFTFS GYFMMWVRQA PGKGLEWVSS IYSSGGYTDY | 60 |
| ADSVKGRFTI SRDNSKNTLY LQMNSLRAED TAVYYCAREV AGTYAFDIWG QGTMVTVSSA | 120 |
| STKGPSVFPL APSSKS | 136 |
| M9-A08 LC | |
| QDIQMTQSPS SLSASVGDRV TVTCRASQRI STYLNWYQQK PGKAPKLLIS GASSLQSGVP | 60 |
| SRFSGSGSGT DFTLTISSLQ PDDFATYYCQ QSYNTPRTFG QGTKVEIR | 108 |
| M9-A08 HC | |
| EVQLLESGGG LVQPGGSLRL SCAASGFTFS AYEMWWVRQA PGKGLEWVSY IGSSGGSTSY | 60 |
| ADSVKGRFTI SRDNSKNTLY LQMNSLRAED TAVYYCTGGN SSSFDAFDIW GQGTMVTVSS | 120 |
| ASTKGPSVFP LAPSSKS | 137 |
| M9-C08 LC | |
| QDIQMTQSPS SLSASVGDRV TITCRASQSI SIYVNWYQQK PGKAPNLLIF AASSLQRGVP | 60 |
| SRFSGSGSGA DFTLTISSLQ PEDFATYYCQ QSFSTPLTFG GGTKVEIK | 108 |
| M9-C08 HC | |
| EVQLLESGGG LVQPGGSLRL SCAASGFTFS HYGMVWVRQA PGKGLEWVSY IVPSGGLTYY | 60 |
| ADSVKGRFTI SRDNSKNTLY LQMNSLRAED TAVYYCARVD YTGDGLGYWG QGTLVTVSSA | 120 |
| STKGPSVFPL APSSKS | 136 |
| M9-C10 LC | |
| QDIQMTQSPS SLSASVGDRV TITCRASQGI SSYLNWYQQK PGNAPNLLIY GASSLQSGVP | 60 |
| SRFSGSGSGT DFTLTISSLQ PEDFATYYCQ ESYSTLFTFG PGTTVEIK | 108 |
| M9-C10 HC | |
| EVQLLESGGG LVQPGGSLRL SCAASGFTFS LYPMQWVRQA PGKGLEWVSS IGSSGGMTFY | 60 |
| ADSVKGRFTI SRDNSKNTLY LQMNSLRAED TAVYYCTREV GAAGFAFDIW GQGTMVTVSS | 120 |
| ASTKGPSVFP LAPSSKS | 137 |
| M9-D08 LC | |
| QDIQMTQSPS SLSASVGDRV TLTCRASRTI SFYLNWYQQK AGKAPELLIY GGSSLHSGVP | 60 |
| SRFSGSGSGT DFSLTISNLQ PEDIAVYYCQ QSFSSPWTFG QGTKVEIK | 108 |
| M9-D08 HC | |
| EVQLLESGGG LVQPGGSLRL SCAASGFTFS WYKMMWVRQA PGKGLEWVSS IYPSGGWTNY | 60 |
| ADSVKGRFTI SRDNSKNTLY LQMNSLRAED TAVYYCTRGS PWGDDAFDIW GQGTMVTVSS | 120 |
| ASTKGPSVFP LAPSSKS | 137 |
| M9-E04 LC | |
| QDIQMIQSPS SLSASVGDRV TITCRASQSI SGYLNWYQQR SGKAPKLLIF AASNLQTGVP | 60 |
| SRFSGSGSGT DFTLTINNLQ PEDFATYYCQ QSHTPPKTFG PGTKVDIK | 108 |
| M9-E04 HC | |
| EVQLLESGGG LVQPGGSLRL SCAASGFTFS EYDMMWVRQA PGKGLEWVSS IGSSGGMTYY | 60 |
| ADSVKGRFTI SRDNSKNTLY LQMNSLRAED TAVYYCARDQ VAAAAIDYWG QGTLVTVSSA | 120 |
| STKGPSVFPL APSSKS | 136 |
| M9-F08 LC | |
| QDIQMTqSPS SLSASVGDRV TITCRASQSI SSYLNWYQQK PGKAPKLLIY AASSLQSGVP | 60 |
| SRFSGSGSGT DFTLTISSLQ PEDFATYYCQ QSYSTPPYTF GQGTKLEIK | 109 |
| M9-F08 HC | |
| EVQLLESGGG LVQPGGSLRL SCAASGFTFS PYAMTWVRQA PGKGLEWVSV IYPSGGFTDY | 60 |
| ADSVKGRFTI SRDNSKNTLY LQMNSLRAED TAMYYCARAS GSYLDAFDIW GQGTMVTVSS | 120 |
| ASTKGPSVFP LAPSSKS | 137 |
| M9-F09 LC | |
| QDIQMTQSPS SLSASVGDRV TITCRASQSI SSYLNWYQQK PGKAPKLLIY AASSLQSGVP | 60 |
| SKFSGSGSGT DYTLTISSLQ PEDFATYYCQ QTYTTPWTFG QGTKVEIK | 108 |
| M9-F09 HC | |
| EVQLLESGGG LVQPGGSLRL SSCAASGFTFS YPMGWVRQA PGKGLEWVSR ISSSGGMTIY | 60 |
| ADSVKGRFTI SRDNSKNTLY LQMNSLRAEDT AVYYCARDD WNVGMDVWGQ GTTVTVSSAS | 120 |
| TKGPSVFPLA PSSKS | 135 |
| M9-F10 LC | |
| QDIQMTQSPS SLSASVGDRV TITCRASQSI NTYLNWYQQK PGKAPKVLIH AASTLESGVP | 60 |
| SRFSGSGSGT DFTLTISSLQ PEDFATYYCQ QSYSTPYTFG QGTKLEVR | 108 |
| M9-F10 HC | |
| EVQLLESGGG LVQPGGSLRL SCAASGFTFS DYDMEWVRQA PGKGLEWVSS ISPSGGSTIY | 60 |
| ADSVKGRFTI SRDNSKNTLY LQMNSLRAED TAVYYCARQG LLTAFDIWGQ GTMVTVSSAS | 120 |
| TKGPSVFPLA PSSKS | 135 |
| M9-G08 LC | |
| QDIQMTQSPS SLSASVGDRV TITCRASQSI SSYLNWYQQK PGKAPKLLIY AASSLQSGVP | 60 |
| SRFSGSGSGT DFTLTISSLQ PEDFATYYCQ QSYSTPITFG GGTKVEIK | 108 |
| M9-G08 HC | |
| EVQLLESGGG LVQPGGSLRL SCAASGFTFS YYTMLWVRQA PGKGLEWVSS IYPSGGFTMY | 60 |
| ADSVKGRFTI SRDNSKNTLY LQMNSLRAED TAVYYCARVD TAMAMIDYWG QGTLVTVSSA | 120 |
| STKGPSVFPL APSSKS | 136 |
| M9-H02 LC | |
| QDIQMTQSPS SLSASVGDRV IITCRASRSI ATYLNWYQQK PGKAPNLLIF GASTLQSGVP | 60 |
| SRFSGSGSGT DFTLTISDLQ PEDFATYYCQ QSFSDPYTFG QGTNLEMK | 108 |
| M9-H02 HC | |
| EVQLLESGGG LVQPGGSLRL SCAASGFTFS AYMMIWVRQA PGKGLEWVSV IYPSGGVTMY | 60 |
| ADSVKGRFTI SRDNSKNTLY LQMNSLRAED TAVYYCARGT VGASDAFDIW GQGTMVTVSS | 120 |
| ASTKGPSVFP LAPSSKS | 137 |
| M9-H03 LC | |
| QYELTQAPSV SVAPGQTASI TCSGDKLGNR YTSWYQQKPG QSPVLVIFQD NKRPSGIPER | 60 |
| FSGSNSGNTA TLTISGTQAM DEADYYCQAL DSNTYVFGTG TKVTVL | 106 |
| M9-H03 HC | |
| EVQLLESGGG LVQPGGSLRL SCAASGFTFS WYSMGWVRQA PGKGLEWVSY IVPSGGYTMY | 60 |
| ADSVKGRFTI SRDNSKNTLY LQMNSLRAED TAVYYCARDP GVSYYYYGMD VWGQGTTVTV | 120 |
| SSASTKGPSV FPLAPSSKS | 139 |
| M9-H04 LC | |
| QDIQMTQSPS SLSASVGDRV TITCRASQSI SSYLNWYQQK PGKAPKLLIY AASSLQSGVP | 60 |
| SRFSGSGSGT DFTLTISSLQ PEDFATYYCQ QSYSTPPTFG QGTRLEIK | 108 |
| M9-H04 HC | |
| EVQLLESGGG LVQPGGSLRL SCAASGFTFS AYTMWWVRQA PGKGLEWVSS IWPSGGSTFY | 60 |
| ADSVKGRFTI SRDNSKNTLY LQMNSLRAED TAVYYCARTY DSSAGEVDYW GQGTLVTVSS | 120 |
| ASTKGPSVFP LAPSSKS | 137 |
| M10-A03 LC | |
| QDIQMTQSPS SLSASVGDRV TITCRASQRI SFYLNWFQQK PGKAPNLLIY GASSLQSGVP | 60 |
| SRFSGSGSGT DFTLTISSLQ PKDFGTYYCQ QTFSTPNTFG QGTKLEIK | 108 |
| M10-A03 HC | |
| EVQLLESGGG LVQPGGSLRLSCAASGFTFS PYPMQWVRQA PGKGLEWVSS ISSSGGMTEY | 60 |
| ADSVKGRFTI SRDNSKNTLY LQMNSLRAED TAVYYCARDD YGGKGGAFDI WGQGTMVTVS | 120 |
| SASTKGPSVF PLAPSSKS | 138 |
| M10-A12 LC | |
| QDIQMTQSPL SLSAFVGDRV TITCRASRDI SVYLNWYQLK SGKAPKLLIY GASSLQSGVP | 60 |
| SRFSGSGSGT DFTLTITSLQ PEDFATYYCQ QSYSIPFTFG GGTKVETK | 108 |
| M10-A12 HC | |
| EVQLLESGGG LVQPGGSLRL SCAASGFTFSLYLMHWVRQA PGKGLEWVSS IYSSGGFTTY | 60 |
| ADSVKGRFTI SRDNSKNTLY LQMNSLRAED TAVYYCARDT DYGMDVWGQG TTVTVSSAST | 120 |
| KGPSVFPLAP SSKS | 134 |
| M10-B09 LC | |
| QDIQMTQSPS SLSASVGDGV TITCRASQSI STYLNWYQQR PGKAPKLLIY GASSLQSGVP | 60 |
| SRFSGSGSGT DFTLTISSLQ REDFATYYCQ QSFSTPWTFG QGTRVEIK | 108 |
| M10-B09 HC | |
| EVQLLESGGG LVQPGGSLRL SCAASGFTFS WYEMSWVRQA PGKGLEWVSR IWPSGGVTMY | 60 |
| ADSVKGRFTI SRDNSKNTLY LqMNSLRAED TAVYYCTRTS ITTVGMDVWG QGTTVTVSSA | 120 |
| STKGPSVFPL APSSKS | 136 |
| M10-C11 LC | |
| QDIQMTQSPS SLSASVGDRV TITCRASQSI SIYLNWYQQK PEKAPKLLIF AASTLQSGVP | 60 |
| SRFSGSGSGT DFTLTISNLQ PEDFATYYCQ QSHSIPPTFG LGTKVEVK | 108 |
| M10-C11 HC | |
| EVQLLESGGG LVQPGGSLRL SCAASGFTFS MYPMMWVRQA PGKGLEWVSY ISPSGGMTDY | 60 |
| ADSVKGRFTI SRDNSKNTLY LQMNSLRAED MAVYYCARVA GSSDAFDIWG QGTMVTVSSA | 120 |
| STKGPSVFPL APSSKS | 136 |
| M10-D11 LC | |
| QDIQMTQSPL SLPVTPGEPA SISCRSSQSL LHSNGYNYLD WYLQKPGQSP QLLIYLGSNR | 60 |
| ASGVPDRFSG SGSGTDFTLK ISRVEAEDVG VYYCMQALQT PLTFGPGTKV HIK | 113 |
| M10-D11 HC | |
| EVQLLESGGG LVQPGGSLRL SCAASGFTFS AYPMNWVRQA PGKGLEWVSR ISSSGGNTSY | 60 |
| ADSVKGRFTI SRDNSKNTLY LQMNSLRAED TAVYYCALGY LGYWGQGTLV TVSSASTKGP | 120 |
| SVFPLAPSSK S | 131 |
| M10-E06 LC | |
| QDIQMTQSPS SLSASVGDRV TITCRASQSI STYLNWYQQK PGKAPKLLIY GASSLQSGVP | 60 |
| SRFSGSGSGT DFTLTISSLQ PEDFTIYYCQ QSYSDPYTFG QGTKLDIK | 108 |
| M10-E06 HC | |
| EVQLLESGGG LVQPGGSLRL SCAASGFTFS LYRMFWVRQA PGKGLEWVSS IWSSGGPTMY | 60 |
| ADSVKGRFTI SRDNSKNTLY LQMNSLRAED TAVYYCAREY PSTYYFDYWG QGTLVTVSSA | 120 |
| STKGPSVFPL APSSKS | 136 |
| M10-F09 LC | |
| QDIQMTQSPS SLSASVGDRV TITCRASQTI DDDLIWYQQK PGRAPKLLIY AASSLQSGVP | 60 |
| SRFSGSGSGT DFTLTITSLQ PEDFATYYCQ QSYNIPRTFG QGTKLESK | 108 |
| M10-F09 HC | |
| EVQLLESGGG LVQPGGSLRL SCAASGFTFS NYDMMWVRQA PGKGLEWVSY ISPSGGFTRY | 60 |
| ADSVKGRFTI SRDNSKNTLY LQMNSLRAED TATYYCAKDI YYYNWGPSHY FDSWGQGTLV | 120 |
| TVSSASTKGP SVFPLAPSSK S | 141 |
| M10-G09 LC | |
| QDIQMTQSPS SLSASVGDSV TITCRASQSI SGYINWYQQK AGKAPKLLIY AASSLQSGVP | 60 |
| SRFSGSGSGT HFTLTISSLQ PEDFATYYCQ QYVSYPFTFG PGTKVDIK | 108 |
| M10-G09 HC | |
| EVQLLESGGG LVQPGGSLRL SCAASGFTFS QYGMQWVRQA PGKGLEWVSS IRSSGGATRY | 60 |
| ADSVKGRFTI SRDNSKNTLY LQMNSLRAED TAVYYCARDG YYDSSGYPDY WGQGTLVTVS | 120 |
| SASTKGPSVF PLAPSSKS | 138 |
| M11-A10 LC | |
| QDIQMTQSPS SLSASVGDRV AITCRASQSI DTYLNWYQQK PGKAPKLLIY DASNLEIGVP | 60 |
| SRFSGSGSGT DFTFIINSLQ PEDVATYYCQ HYLYAPYSFG QGTKLEIK | 108 |
| M11-A10 HC | |
| EVQLLESGGG LVQPGGSLRL SCAASGFTFS NYWMMWVRQA PGKGLEWVSG IGSSGGFTSY | 60 |
| ADSVKGRFTI SRDNSKNTLY LQMNSLRAED TAVYYCAKGS YSDYGVFESW GQGTLVTVSS | 120 |
| ASTKGPSVFP LAPSSKS | 137 |
| M11-E01 LC | |
| QDIQMTQSPS SLSASVGDRV TITCRASQSI SSYLNWYQQK PGKAPKLLIY AASSLQSGVP | 60 |
| SRFSGSGSGT DFTLTISSLQ PEDFATYYCQ QSYSTPPTFG QGTKVEIK | 108 |
| M11-E01 HC | |
| EVQLLESGGG LVQPGGSLRL SCAASGFTFS TYEMYWVRQA PGKGLEWVSG IGSSGGMTMY | 60 |
| ADSVKGRFTI SRDNSKNTLY LQMNSLRAED TAMYYCAREQ PGIAALQFWG QGTLVTVSSA | 120 |
| STKGPSVFPL APSSKS | 136 |
| M11-E04 LC | |
| QDIQMTQSPS SLSASVGDRV TITCRASQSI SIYLTWYQHR PGKAPNLLIY GAATLQTGVP | 60 |
| SRFSGSGSGT DFTLTIRGLQ PEDFATYYCQ QTFSLPRTFG QGTKLEIK | 108 |
| M11-E04 HC | |
| EVQLLESGGG LVQPGGSLRL SCAASGFTFS MYHMNWVRQA PGKGLEWVSG IVSSGGVTFY | 60 |
| ADSVKGRFTI SRDNSKNTLY LQMNSLRAED TAVYYCARIT TVTTGGAFDI WGQGTMVTVS | 120 |
| SASTKGPSVF PLAPSSKS | 138 |
| M11-E05 LC | |
| QDIQMTQSPS SLSASVGDTV TITCRTSQTI NNYLNWYQQR PGEAPKVLIY ATHTLESGVP | 60 |
| SRFSGSGSGT DFTLTIGSLQ PEDFATYYCQ QSFAFPYTFG QGTKVEIT | 108 |
| M11-E05 HC | |
| EVQLLESGGG LVQPGGSLRL SCAASGFTFS WYTMGWVRQA PGKGLEWVSW IYFGGLTTYA | 60 |
| DSVKGRFTIS RDNSKNTLYL QMNSLRAEDTAVYYCARLGG PLDAFDIWGQ GTMVTVSSAS | 120 |
| TKGPSVFPLA PSSKS | 135 |
| M11-E06 LC | |
| QDIQMTQSPS SLSASIGDRV TISCRASRGI GTYLNWYQQH AGKAPKLLIR AASSLETGVP | 60 |
| PRFSGSGSGT DFTLTISSLQ SDDFATYYCQ ESFTNVYNFG QGTKLEIK | 108 |
| M11-E06 HC | |
| EVQLLESGGG LVQPGGSLRL SCAASGFTFS QYAMHWVRQA PGKGLEWVSS IYPSGGFTLY | 60 |
| ADSVKGRFTI SRDNSKNTLY LQMNSLRAED TAMYYCARGG WLAGGELLNW GQGTLVTVSS | 120 |
| ASTKGPSVFP LAPSSKS | 137 |
| M11-G09 LC | |
| QDIQMTQSPS SLSASVGDRV TITCRTSQGI NHYLNWYQQK PGKAPKILVF AASELQTGVP | 60 |
| SRFSGTGSGT SYTLTITSLQ PEDVATYYCQ QTYTSPYTFG QGTKLEVK | 108 |
| M11-G09 HC | |
| EVQLLESGGG LVQPGGSLRL SCAASGFTFS LYNMTWVRQA PGKGLEWVSY IYPSGGGTHY | 60 |
| ADSVKGRFTI SRDNSKNTLY LQMNSLRAED TAVYYCARDT GFWSADAFDI WGQGTMVTVS | 120 |
| SASTKGPSVF PLAPSSKS | 138 |
| M11-G12 LC | |
| QDIQMTQSPS SLSAFVGDRV SITCRASQTI SVYVNWYQHK SGQAPKLLIY GASSLQSGVP | 60 |
| SRFSGSGSGT DFTLTISSLQ PEDFATYFCQ QSYSIPFTFG GGTDVQIR | 108 |
| M11-G12 HC | |
| EVQLLESGGG LVQPGGSLRL SCAASGFTFS QYPMNWVRQA PGKGLEWVS ISSSGGFTTY | 60 |
| ADSVKGRFTI SRDNSKNTLY LQMNSLRAED TAVYYCAREE QQGGFDYWGQ GTLVTVSSAS | 120 |
| TKGPSVFPLA PSSKS | 135 |
| M12-A08 LC | |
| QDIQMTQSPS SLSASVGDRV TITCRASQSI SRYLNWYQQK PGKAPKLLIY AASTLETGVP | 60 |
| SRFSGSGSGT DFTLTITTLQ PEDFVIYYCQ QSYSTPYTFG QGTKLEIK | 108 |
| M12-A08 HC | |
| EVQLLESGGG LVQPGGSLRL SCAASGFTFS WYYMGWVRQA PGKGLEWVSW IVSSGGLTLY | 60 |
| ADSVKGRFTI SRDNSKNTLY LQMNSLRAED TAMYYCARTT VTTGDAFDIW GQGTMVTVSS | 120 |
| ASTKGPSVFP LAPSSKS | 137 |
| M12-B04 LC | |
| QDIQMTQSPS SLSASVGDRV TITCRASQGI RNDLGWYQHK PGKAPKLLIY AASILQSGVP | 60 |
| SRFSGTASGT DFTLTISSLQ PEDFATYFCL QDYEYPLTFG GGTKLDIK | 108 |
| M12-B04 HC | |
| EVQLLESGGG LVQPGGSLRL SCAASGFTFS LYSMYWVRQA PGKGLEWVSR IRPSGGGTVY | 60 |
| ADSVKGRFTI SRDNSKNTLY LQMNSLRAED TAVYYCARDP LYSSGDVWGQ GTTVTVSSAS | 120 |
| TKGPSVFPLA PSSKS | 135 |
| M12-C09 LC | |
| QDIQMTQSPS SLSASVGDRV TITCRASQSI GIYLNWYHQK PGKAPNLLIY GASSLQSGVP | 60 |
| SRFSGSGSGT DFTLTISSLQ PGDFATYYCQ HSYSTPFTFG GGTKVEIK | 108 |
| M12-C09 HC | |
| EVQLLESGGG LVQPGGSLRL SCAASGFTFS SYAMVWVRQA PGKGLEWVSS IGSSGGFTLY | 60 |
| ADSVKGRFTI SRDNSKNTLY LQMNSLRAED TAVYYCASMN LGGGDAFDIW GQGTMVTVSS | 120 |
| ASTKGPSVFP LAPSSKS | 137 |
| M12-C10 LC | |
| QSALTQPPSV SVSPGQTASI TCSGDKLGEK YVSWYQQKPG QSPVWIYQD NKRPSGIPER | 60 |
| FSGSNSGNTA TLTISGTQAV DEADYYCQAW DSYTWFGGG SKLTVLGQPK | 110 |
| M12-C10 HC | |
| EVQLLESGGG LVQPGGSLRL SCAASGFTFS DYEMHWVRQA PGKGLEWVSG ISPSGGKTQY | 60 |
| ADSVKGRFTI SRDNSKNTLY LQMNSLRAED TAVYYCARDL KWGGRGSPDW YFDLWGRGTL | 120 |
| VTVSSASTKG PSVFPLAPSS KS | 142 |
| M12-D10 LC | |
| QDIQMTQSPS SLSASVGDRV TITCRASQSI SSYLNWYQQK PGKAPKLLIY AASSLQSGVP | 60 |
| SRFSGSGSGT DFTLTISSLQ PEDFATYYCQ QSYSTPPTFG GGTKVEIK | 108 |
| M12-D10 HC | |
| EVQLLESGGG LVQPGGSLRL SCAASGFTFS NYPMDWVRQA PGKGLEWVSS ISSSGGWTNY | 60 |
| ADSVKGRFTI SRDNSKNTLY LQMNSLRAED TAVYYCATDT SGSYLGFDYW GQGTLVTVSS | 120 |
| ASTKGPSVFP LAPSSKS | 137 |
| M12-E06 LC | |
| QDIQMTQSPS SLSASVGDRV SITCRASQSI STYLNWYQHK PGKAPTLLIY GAFSLQSGVP | 60 |
| SRFSGSGSGT DFALTISSLQ PEDFATYYCQ QSHSTPPTFG QGTRVEIK | 108 |
| M12-E06 HC | |
| EVQLLESGGG LVQPGGSLRL SCAASGFTFS QYKMLWVRQA PGKGLEWVSG IGPSGGLTAY | 60 |
| ADSVKGRFTI SRDNSKNTLY LQMNSLRAED TAVYYCARAP WFGELGMDVW GQGTTVTVSS | |
| ASTKGPSVFP LAPSSKS | 137 |
| M27-A10 LC | |
| QDIQMTQSPS SLSASVGDRV TITCRASQSI SAYLNWYQQK PGKAPQLLMY GVGSLQSGVP | 60 |
| SRFSGSGSGT DFTLTISSLQ PEDFATYFCQ QGYTTPVTFG GGTKVEIK | 108 |
| M27-A10 HC | |
| EVQLLESGGG LVQPGGSLRL SCAASGFTFS WYRMDWVRQA PGKGLEWVSS IWPSGGLTSY | 60 |
| ADSVKGRFTI SRDNSKNTLY LQMNSLRAED TAVYYCARGW APGGDAFDIW GQGTMVTVSS | 120 |
| ASTKGPSVFP LAPSSKS | 137 |
| M27-B01 LC | |
| QDIQMTQSPS SLSASVGDRV TITCRASQSI SSYLNWYQQK PGKAPKLLIY AASSLQSGVP | 60 |
| SRFSGSGSGT DFTLTISSLQ PEDFATYYCQ QSYSTPYTFG QGTKLEIK | 108 |
| M27-B01 HC | |
| EVQLLESGGG LVQPGGSLRL SCAASGFTFS DYTMWWVRQA PGKGLEWVSS ISSSGGITFY | 60 |
| ADSVKGRFTI SRDNSKNTLY LQMNSLRAED TAVYYCARSA DTAMGGAFDI WGQGTMVTVS | 120 |
| SASTKGPSVF PLAPSSKS | 138 |
| M27-B12 LC | |
| QYELTQPPAV SVSPGQTATI TCSGDKLGDE YAAWYQQKPG QSPVLVIYQD RKRPSGIPER | 60 |
| FSGSNFGNTA TLTITGTQVM DEADYYCQAW GKRNWFGGG TKLTVL | 106 |
| M27-B12 HC | |
| EVQLLESGGG LVQPGGSLRL SCAASGFTFS WYQMMWVRQA PGKGLEWVSS ISPSGGITEY | 60 |
| ADSVKGRFTI SRDNSKNTLY LQMNSLRAED TAVYYCARDR SSGWYYYGMD VWGQGTTVTV | 120 |
| SSASTKGPSV FPLAPSSKS | 139 |
| M27-E03 LC | |
| QDIQMTQSPS SLSASVGDRV TITCRASQSI SSYLNWYQQK PGKAPKLLIY AASSLQSGVP | 60 |
| SRFSGSGSGT DFTLTISSLQ PEDFATYYCQ QSYSTPRTFG QGTKVEIK | 108 |
| M27-E03 HC | |
| EVQLLESGGG LVQPGGSLRL SCAASGFTFS SYMMHWVRQA PGKGLEWVSG IYPSGGWTDY | 60 |
| ADSVKGRFTI SRDNSKNTLY LQMNSLRAED TATYYCARLV AGLDAFDIWG QGTMVTVSSA | 120 |
| STKGPSVFPL APSSKS | 136 |
| M27-F04 LC | |
| QDIQMTQSPS SLSASVGDRV TITCRASQSI SSYLNWYQQK PGKAPKLLIY AASSLQSGVP | 60 |
| SRFSGSGSGT DFTLTISSLQ PEDFATYYCQ QSYSTPPTFG QGTKVEIK | 108 |
| M27-F04 HC | |
| EVQLLESGGG LVQPGGSLRL SCAASGFTFS WYPMTWVRQA PGKGLEWVSS IGPSGGQTIY | 60 |
| ADSVKGRFTI SRDNSKNTLY LQMNSLRAED TAVYYCTTEY GDYGGGFDPW GQGTLVTVSS | 120 |
| ASTKGPSVFP LAPSSKS | 137 |
| M27-F11 LC | |
| QDIQMTQSPS FLSASVGDRV TITCRASQGI SSYLAWYQQK PGKAPKLLIY AASSLQSGVP | 60 |
| SRFSGSGSGT DFTLTISSLQ PEDFATYYCQ QSYNTLRTFG PGTKVDLK | 108 |
| M27-F11 HC | |
| EVQLLESGGG LVQPGGSLRL SCAASGFTFS SYHMMWVRQA PGKGLEWVSS IYPSGGATMY | 60 |
| ADSVKGRFTI SRDNSKNTLY LQMNSLRAED TAMYYCARDG YHYGDYTYFQ HWGQGTLVTV | 120 |
| SSASTKGPSV FPLAPSSKS | 139 |
| M27-G01 LC | |
| QDIQMTQSPS SLSASVGDRV TITCRASQSI STYLNWYQQK PGKAPKLLIY GASSLQSGVP | 60 |
| SRFSGSGSGT DFTLTISSLQ PEDFTIYYCQ QSYSDPYTFG QGTKLDIK | 108 |
| M27-G01 HC | |
| EVQLLESGGG LVQPGGSLRL SCAASGFTFS LYRMFWVRQA PGKGLEWVSS IWSSGGPTMY | 60 |
| ADSVKGRFTI SRDNSKNTLY LQMNSLRAED TAVYYCAREY PSTYYFDYWG QGTLVTVSSA | 120 |
| STKGPSVFPL APSSKS | 136 |
| M27-G04 LC | |
| QDIQMTQSPS SLSASVGDRV TITCRASQRI SYYLTWYQQK PGKVPKLLIY AASSLESGVP | 60 |
| SRFSGSGSGT DFTLTISNLQ PEDFATYYCQ QAFSTPFTFG GGTKVEIK | 108 |
| M27-G04 HC | |
| EVQLLESGGG LVQPGGSLRL SCAASGFTFS AYYMVWVRQA PGKGLEWVSY ISPSGGQTQY | 60 |
| ADSVKGRFTI SRDNSKNTLY LQMNSLRAED TAVYYCAREA ISSSSFDYWG QGTLVTVSSA | 120 |
| STKGPSVFPL APSSKS | 136 |
| M27-G09 LC | |
| QDIQMTQSPS SVSASVGDRI TITCRTRQSI SNYLNWYQQK PGEPPKLLIF AASSLQSGVP | 60 |
| SRFSGSGTGT EFTLTISSLQ PEDLAIYYCQ QSYDIPFTFG QGTKLEIK | 108 |
| M27-G09 HC | |
| EVQLLESGGG LVQPGGSLRL SCAASGFTFS EYDMAWVRQA PGKGLEWVSY IVSSGGFTSY | 60 |
| ADSVKGRFTI SRDNSKNTLY LQMNSLRAED TAVYYCTTWA GWIAAADYWG QGTLVTVSSA | 120 |
| STKGPSVFPL APSSKS | 136 |
| M27-H10 LC | |
| QDIQMTQSPS SLSASVGDRV TITCRASQSI SNYLNWYQQK PGKAPKFLIY AASSLQSGVP | 60 |
| SRFSGSGSGT DFTLSISSLQ PEDFATYYCQ QSYSTPQTFG QGTKVEMK | 108 |
| M27-H10 HC | |
| EVQLLESGGG LVQPGGSLRL SCAASGFTFS AYQMAWVRQA PGKGLEWVSV IYSSGGYTDY | 60 |
| ADSVKGRFTI SRDNSKNTLY LQMNSLRAED TAVYYCARHN WNDGAFDIWG QGTMVTVSSA | 120 |
| STKGPSVFPL APSSKS | 136 |
| M28-A01 LC | |
| QDIQMTQSPS SLSASVGDRV TITCRASQSI SSYLNWYQQK PGKAPKLLIY AASSLQSGVP | 60 |
| SRFSGSGSGT DFTLTISSLQ PEDFATYYCQ QSYSTLTFGG GTKVEIK | 107 |
| M28-A01 HC | |
| EVQLLESGGG LVQPGGSLRL SCAASGFTFS WYAMHWVRQA PGKGLEWVSG IYSSGGYTKY | 60 |
| ADSVKGRFTI SRDNSKNTLY LQMNSLRAED TAVYYCARDL SNGDDVFDIW GQGTMVTVSS | 120 |
| ASTKGPSVFP LAPSSKS | 137 |
| M28-C03 LC | |
| QDIQMTQSPS SLSASVGDRV TITCRASQSI NFYLNWYQQK PGKAPKLLIY VASSLESGVP | 60 |
| SRFSGSASGT EFTLTISSLQ PEDFATYYCL QSYSAPYTFG QGTKVEIT | 108 |
| M28-C03 HC | |
| EVQLLESGGG LVQPGGSLRL SCAASGFTFS YYQMGWVRQA PGKGLEWVSS IYPSGGMTDY | 60 |
| ADSVKGRFTI SRDNSKNTLY LQMNSLRAED TAVYYCTRGS PWGDDAFDIW GQGTMVTVSS | 120 |
| ASTKGPSVFP LAPSSKS | 137 |
| M28-D02 LC | |
| QDIqMTQSPS SLSASEGDMV TITCRTSRRI GTYLNWYQQK PGKAPKLLIY GASSLQSGVP | 60 |
| SRFSGSGSGT DFTLTVSSLQ PEDVGTYYCQ QSFSSPWTFG PGTKVEIK | 108 |
| M28-D02 HC | |
| EVQLLESGGG LVQPGGSLRL SCAASGFTFS WYPMQWVRQA PGKGLEWVSY IYPAGGGTDY | 60 |
| ADSVKGRFTI SRDNSKNTLY LQMNSLRAED TATYYCATSS GWLGDAFDIW GQGTMVTVSS | 120 |
| ASTKGPSVFP LAPSSKS | 137 |
| M28-D12 LC | |
| QDIQMTQSPS SLSASVGDRV TITCRASQSI ATYLNWYQQK PGRAPKLLIY AASSLQSGVP | 60 |
| SRFVGGGSGS GTHFTLTISS LQPEDFATYY CQQSYSTRET FGQGTKVEIK | 110 |
| M28-D12 HC | |
| EVQLLESGGG LVQPGGSLRL WSCAASGFTFS YTMHWVRQA PGKGLEWVSV IYPSGGPTSY | 60 |
| ADSVKGRFTI SRDNSKNTLY LQMNSLRAEDT ATYYCARDG SGSYLGFDYW GQGTLVTVSS | 120 |
| ASTKGPSVFP LAPSSKS | 137 |
| M28-E01 LC | |
| QDIQMTQSPS SLSASVGDRV TITCRASQSI SSYLNWYQQK PGKAPKLLIY AASSLQSGVP | 60 |
| SKFSGSGSGT DYTLTISSLQ PEDFATYYCQ QTYTTPWTFG QGTKVEIK | 108 |
| M28-E01 HC | |
| EVQLLESGGG LVQPGGSLRL SCAASGFTFS SYPMGWVRQA PGKGLEWVSR ISSSGGMTIY | 60 |
| ADSVKGRFTI SRDNSKNTLY LQMNSLRAED TAVYYCARDD WNVGMDVWGQ GTTVTVSSAS | 120 |
| TKGPSVFPLA PSSKS | 135 |
| M28-E11 LC | |
| QDIQMTQSPS SVSASVGDRV TINCRASQDI SNWLAWYQQK PGKAPNLLIY AASSLQTGAP | 60 |
| SRFSGSGSGT DFTLTISSLQ PEDFGTYVCQ QSYSLPWTFG LGTKVEVR | 108 |
| M28-E11 HC | |
| EVQLLESGGG LVQPGGSLRL SCAASGFTFS LYDMTWVRQA PGKGLEWVSG ISSSGGVTIY | 60 |
| ADSVKGRFTI SRDNSKNTLY LQMNSLRAED TAVYYCARTY YYDSSGYADA FDIWGQGTMV | 120 |
| TVSSASTKGP SVFPLAPSSK S | 141 |
| M28-F01 LC | |
| QDIQMTQSPS SLSASVGDRV TITCRASQSI NTYLNWYQQK PGKAPKVLIH AASTLESGVP | 60 |
| SRFSGSGSGT DFTLTISSLQ PEDFATYYCQ QSYSTPPTFG QGTKVEIK | 108 |
| M28-F01 HC | |
| EVQLLESGGG LVQPGGSLRL SCAASGFTFS VYLMHWVRQA PGKGLEWVSG ISPSGGYTQY | 60 |
| ADSVKGRFTI SRDNSKNTLY LQMNSLRAED TAVYYCARPG GLDAFDIWGQ GTMVTVSSAS | 120 |
| TKGPSVFPLA PSSKS | 135 |
| M28-F05 LC | |
| QDIQMTQSPS SLSASVGDRV TITCRASQSI SSYLNWYQQK PGKAPKLLIY AASSLQSGVP | 60 |
| SRFSGSGSGT DFTLTISSLQ PEDFATYYCQ QSYSTPLTFG GGTKVEIK | 108 |
| M28-F05 HC | |
| EVQLLESGGG LVQPGGSLRL SCAASGFTFS RYIMWWVRQA PGKGLEWVSG IYSSGGYTQY | 60 |
| ADSVKGRFTI SRDNSKNTLY LQMNSLRAED TAMYYCAREL EGLGGFDYWG QGTLVTVSSA | 120 |
| STKGPSVFPL APSSKS | 136 |
| M28-F07 LC | |
| QDIQMTQSPS SVSASVGDRV TITCRASQGI SSWLAWYQQK PGKAPKLLIY ATSGLQSGVP | 60 |
| SRFSGSGSGT DFTLTISSLQ PEDFATYYCQ QAKSFPLTFG GGTRVEIK | 108 |
| M28-F07 HC | |
| EVQLLESGGG LVQPGGSLRL SCAASGFTFS DYTMYWVRQA PGKGLEWVSS IVPSGGHTLY | 60 |
| ADSVKGRFTI SRDNSKNTLY LQMNSLRAED TAVYYCAKDH LSSWYGGFFD YWGQGTLVTV | 120 |
| SSASTKGPSV FPLAPSSKS | 139 |
| M29-C07 LC | |
| QDIQMTQSPS SLSASVGDRV TITCRASQSI SSYLNWYQQK PGKAPKLLIY AASSLQSGVP | 60 |
| SRFSGSGSGT DFTLTISSLQ PEDFATYYCQ QSYSTRYTFG QGTKLEIK | 108 |
| M29-C07 HC | |
| EVQLLESGGG LVQPGGSLRL SCAASGFTFS GYDMMWVRQA PGKGLEWVSV ISSSGGNTAY | 60 |
| ADSVKGRFTI SRDNSKNTLY LQMNSLRAED TAVYYCARES SGLYYFDYWG QGTLVTVSSA | 120 |
| STKGPSVFPL APSSKS | 136 |
| M29-D10 LC | |
| QDIQMTQSPS SLSASVGDTV SITCRASQSI TIYLNWYQHK PGKAPNLLIY GASNLHSGVP | 60 |
| SRFSGSGSGT DFTLTISSLQ PEDFATYYCQ QSYDTPLTFG GGTKVEIK | 108 |
| M29-D10 HC | |
| EVQLLESGGG LVQPGGSLRL SCAASGFTFS WYPMYWVRQA PGKGLEWVSS IGSSGGPTPY | 60 |
| ADSVKGRFTI SRDNSKNTLY LQMNSLRAED TAVYYCARWA DYGGSLDYWG QGTLVTVSSA | 120 |
| STKGPSVFPL APSSKS | 136 |
| M29-E02 LC | |
| QSVLTQPPSV SEAPRQRVTI SCSGSSSNIG NNAVSWYQQL PGKAPKLLIY YDDLLPSGVS | 60 |
| DRFSGSKSGT SASLAISGLR SEDEADYYCA AWDDSLNGFV FGTGTKVTVL | 110 |
| M29-E02 HC | |
| EVQLLESGGG LVQPGGSLRL SCAASGFTFS RYPMMWVRQA PGKGLEWVSV IYPSGGDTFY | 60 |
| ADSVKGRFTI SRDNSKNTLY LQMNSLRAED TAVYYCASGD DYLWEAAVYW GQGTLVTVSS | 120 |
| ASTKGPSVFP LAPSSKS | 137 |
| M29-G08 LC | |
| QDIQMTQSPA TLSASPGETV TLSCRASQNI GNDVAWYRQR PGQAPRLLIH HASTRAYGIP | 60 |
| ARLRGSGSAT EFTLTITSLE PEDFAIYYCQ QFYDWPAHTF ALGTRLEIKR | 110 |
| M29-G08 HC | |
| EVQLLESGGG LVQPGGSLRL SCAASGFTFS YYHMWWVRQA PGKGLEWVSG ISPSGGFTFY | 60 |
| ADSVKGRFTI SRDNSKNTLY LQMNSLRAED TAVYYCARDY YYDSSGYSPL GYWGQGTLVT | 120 |
| VSSASTKGPS VFPLAPSSKS | 140 |
| M29-G10 LC | |
| QDIQMTQSPS SLSSSVGDSA TITCRASQSI SIYLNWYQQK PGKAPKILIY GASQLESGVP | 60 |
| SRFSGSGSGT DFTLTVSGLQ PEDFATYWCQ QSYNVPYTFG QGTKLEIK | 108 |
| M29-G10 HC | |
| EVQLLESGGG LVQPGGSLRL SCAASGFTFS FYKMIWVRQA PGKGLEWVSS ISSSGGSTQY | 60 |
| ADSVKGRFTI SRDNSKNTLY LQMNSLRAED TAVYYCARDR VDLGYLDYWG QGTLVTVSSA | 120 |
| STKGPSVFPL APSSKS | 136 |
| M74-A07 LC | |
| QDIQMTQSPS SLSASVRDRV TITCRTSQNI NTYLNWYYQA PGRAPKLLIF GVSSLHRGVS | 60 |
| SRFSGSGDGT EFTLTISSLQ PEDIGTYFCQ QSYSSPWTFG QGTKVEIK | 108 |
| M74-A07 HC | |
| EVQLLESGGG LVQPGGSLRL SCAASGFTFS QYLMMWVRQA PGKGLEWVSS IYPSGGYTSY | 60 |
| ADSVKGRFTI SRDNSKNTLY TLQMNSLRAE DAVYYCARVS TAVADNDYWG QGTLVTVSSA | 120 |
| STKGPSVFPL APSSKS | 136 |
| M76-F02 LC | |
| QDIQMTQSPS SLSASVGDRV TITCRASQTI DNYLHWYQQK PGKAPKVLIH DASSLQSGVP | 60 |
| PRFSGSGSGT DFTLTISSLQ PEDFATYYCQ QSYDTPQYTF GQGTKLEIK | 109 |
| M76-F02 HC | |
| EVQLLESGGG LVQPGGSLRL SCAASGFTFS LYDMNWVRQA PGKGLEWVSG ISPSGGQTMY | 60 |
| ADSVKGRFTI SRDNSKNTLY LQMNSLRAED TAVYYCARQP MISAFDIWGQ GTMVTVSSAS | 120 |
| TKGPSVFPLA PSSKS | 135 |
| M76-G02 LC | |
| QDIQMTQSPS SLSASVGDRV TITCRASQSI SSYLNWYQQK PGKAPKLLIY AASSLQSGVP | 60 |
| SRFSGSGSGT DFTLTISSLQ PEDFATYYCQ QSYSTPPWTF GQGTKVEIK | 109 |
| M76-G02 HC | |
| EVQLLESGGG LVQPGGSLRL SCAASGFTFS LYAMWWVRQA PGKGLEWVSY ISSSGGFTSY | 60 |
| ADSVKGRFTI SRDNSKNTLY LQMNSLRAED TAVYYCARYR VGVAATDYWG QGTLVTVSSA | 120 |
| STKGPSVFPL APSSKS | 136 |
| M76-G06 LC | |
| QDIQMTQSPS SLSASVRDRV TITCRASQSI STYLNWYQQK PGEAPKLLVF AASSLQSGVP | 60 |
| SRFSGSGSGT DFTLSISSLQ PEDFATYYCQ QSYSTPHTFG QGAKVEIK | 108 |
| M76-G06 HC | |
| EVQLLESGGG LVQPGGSLRL SCAASGFTFS GYIMHWVRQA PGKGLEWVSW IYPSGGWTEY | 60 |
| ADSVKGRFTI SRDNSKNTLY LQMNSLRAED TAVYYCARDA PGVGAIDYWG QGTLVTVSSA | 120 |
| STKGPSVFPL APSSKS | 136 |
| M76-H02 LC | |
| QDIQMTQSPS SLSASEGDRV TITCRASQDI SVYLNWYQMK SGKAPKLLIY GGASLQSGVP | 60 |
| ARFSGSGYGT DFTLTITDLR QPEDFATYYCQ SYSLPFTFG GGTKVEIK | 108 |
| M76-H02 HC | |
| EVQLLESGGG LVQPGGSLRL SCAASGFTFS MYWMQWVRQA PGKGLEWVSY IYPSGGPTKY | 60 |
| ADSVKGRFTI SRDNSKNTLY LQMNSLRAED TAVYYCARPS GSYGDAFDIW GQGTMVTVSS | 120 |
| ASTKGPSVFP LAPSSKS | 137 |
| M77-C07 LC | |
| QDIQMTQSPS TLSASVGDRV TITCRASQNI SSYLNWYQQK PGKAPKLLIY AASSLQSGVP | 60 |
| SRFSGSGSGT DFTLTISSLQ PEDFATYSCQ QSYSTPRTFG QGTKVEIK | 108 |
| M77-C07 HC | |
| EVQLLESGGG LVQPGGSLRL SCAASGFTFS LYIMGWVRQA PGKGLEWVSG IYPSGGFTMY | 60 |
| ADSVKGRFTI SRDNSKNTLY LQMNSLRAED TAVYYCARES SGVAAPDYWG QGTLVTVSSA | 120 |
| STKGPSVFPL APSSKS | 136 |
| M77-H04 LC | |
| QDIQMTQSPL SLPVTPGEPA SISCRSSQSL LHSRGYNYLD WYLQKPGQSP QLLIYLGSNR | 60 |
| ASGVPDRFSG SGSGTDFTLK ISRVEAEDVG VYYCMQALQR RTFGQGTKLE IK | 112 |
| M77-H04 HC | |
| EVQLLESGGG LVQPGGSLRL SCAASGFTFS YYTMIWVRQA PGKGLEWVSG IRSSGGGTRY | 60 |
| ADSVKGRFTI SRDNSKNTLY LQMNSLRAED TAVYYCAKDG SRYSYGSIYY YYGMDAWGQG | 120 |
| TTVTVSSAST KGPSVFPLAP SSKS | 144 |

### Example 2: Lead Antibody Inhibitors

[0934] Antibodies were selected as lead plasma kallikrein inhibitors on the basis of apparent inhibition constant (K_{i,app}), specificity with respect to lack of inhibition of other serine proteases, inhibition of bradykinin generation, and lack of binding to plasma prekallikrein (Table 3). Plasma kallikrein circulates in the plasma as an inactive zymogen (prekallikrein) at a concentration of approximately 500 nM. Antibodies that bound prekallikrein may be rendered inaccessible towards active plasma kallikrein inhibition and could substantially increase the in vivo dose required for efficacy. Therefore, a surface plasmon resonance (SPR) assay was used to identify antibodies that do not bind prekallikrein (data not shown). Specifically, human IgGs (X81-B01, M162-A04 (R84-H05); M160-G12 (R84-D02); and M142-H08) were captured on a CM5 chip using an anti-human Fc surface and 100 nM of plasma kallikrein or 100 nM or 500 nM prekallikrein. The prekallikrein was treated with aprotinin-sepharose to remove active plasma kallikrein. The prekallikrein used for X81-B01 was buffer exchanged into the exact preparation of SPR running buffer (HEPES buffered saline) to avoid the refractive index shift that was observed with three other antibodies that were tested: M162-A04 (R84-H05); M160-G12 (R84-D02); and M142-H08.

[0935] Of the antibodies listed in Table 3, only M142-H08 inhibits human plasma kallikrein with a subnanomolar K_{i,app}. However, when M142-H08 was produced as an IgG it was found to be cleaved in the CDR3 of the heavy chain. Consequently, we decided to undertake two approaches to improve the affinity: 1) affinity maturation of M162-A04 and M160-G12 using a novel form of light chain shuffling called ROLIC (Rapid Optimization of Light Chains) (see, e.g., WO 2009/102927 and U.S. 2009-0215119); and 2) sequence optimization of M142-H08 in order to prevent the cleavage of the IgG that occurs while retaining the binding and inhibitor properties of M142-H08.

TABLE 3
Top Ranking Antibody Inhibitors of PKal Before
Affinity Maturation or Sequence Optimization

| Criteria | M162-A04 | M160-G12 | M142-H08^{a} |
|---|---|---|---|
| K_{i,app} human pKal | 2 nM | 5.6 nM | 0.6 nM |
| | (as an IgG) | (as an IgG) | (as a Fab) |
| K_{i,app} rodent pKal | 2 nM | <1 nM | ~1 nM |
| | (mouse | (mouse) | (mouse |
| | and rat) | | and rat) |
| Binds prekallikrein? | No | No | No |
| Specific inhibitor with respect to | Yes | Yes | Yes |
| fXIa, plasmin, and trypsin | | | |
| Inhibits bradykinin generation | Yes | Yes | Yes |

^{a}When M142-H08 was produced as an IgG it was determined to be cleaved in the CDR3 of its heavy chain (GGLLLWFR-ELKSNYFDY).

### Example 3: Sequence Optimization of M142-H08

[0936] Of the antibodies listed in Table 3, only M142-H08 inhibits human pKal with a subnanomolar K_{i,app}. However, when M142-H08 was produced as an IgG it was found to be cleaved in the CDR3 of the heavy chain. M142-H08 was found by mass spectrometry to be cleaved after the arginine in the “WFR” sequence of the HC-CDR3 sequence (GGLLLWFRELKSNYFDY). This cleavage suggests that a protease from the cells used to express the antibody (both CHO and 293T human kidney cells) is enzymatically cleaving the antibody at a single specific site. We mutated the HC-CDR3 sequence of M142-H08 in order to identify amino acid substitutions that prevent the cleavage of the IgG that occurs while retaining the binding and inhibitor properties of M142-H08. Previous experience with similarly “clipped” antibodies suggested that focusing simply on the putative P1 position (protease subsite 1, see Table 4) may not be sufficient to identify antibodies that retain potent inhibition of the target enzyme while not being clipped by a host cell protease. Therefore, we created a small library of single point mutations in the region around the cleavage site in order to identify variants of M142-H08 that are not clipped but are still potent pKal inhibitors. We refer to this library as the “CDR3 by Design” library. The small library was constructed using a PCR primer that contains the randomized codon NNK at either the P3, the P2, the P1, or the P1′ site. This results in a small library where each of the 4 positions may contain any of the 20 amino acids (20+20+20+20=80 members). Using PCR, this library was cloned into the M142-H08 Fab sequence in the pMid21 vector, which is a standard phagemid vector.

TABLE 4
Primer sequences

| Primer Name | Sequence | N |
|---|---|---|
| | P3 P2 P1 P1′ P2′ | |
| | G G L L L W F R E L K S N Y | |
| 559A.P1.top | GGC GGT CTA TTA CTA TGG TTC NNK GAG CTG AAG TCT AAC TAC | 20 |
| 559A.P2.top | GGC GGT CTA TTA CTA TGG NNK AGG GAG CTG AAG TCT AAC TAC | 20 |
| 559A.P3.top | GGC GGT CTA TTA CTA NNK TTC AGG GAG CTG AAG TCT AAC TAC | 20 |
| 559A.P1p.top | GGC GGT CTA TTA CTA TGG TTC AGG NNK CTG AAG TCT AAC TAC | 20 |

[0937] By DNA sequencing, we recovered 61 of the possible 80 antibodies (Table 5). These antibodies were produced as Fab fragments in small scale (˜20 μg) and tested for inhibition against human pKal in an in vitro protease cleavage assay using Pro-Phe-Arg-aminomethylcoumarin as the synthetic peptide substrate. The Fabs that were found to be inhibitors of human pKal were subcloned into our pBRH1f vector (a vector for transient expression of IgGs in 293T cells) for conversion to full length human IgG1 antibodies. Five antibodies were then expressed in 293T cells and purified by protein A sepharose chromatography. The antibodies were analyzed by SDS-PAGE to determine which of the inhibitory mutants are not cleaved by the host cell protease(s) (data not shown). The cleaved antibodies (559A-X67-G05, 559A-X67-H01, 559A-X67-G09) had an extra band that migrated between the 38 and the 49 kDa molecular weight marker. This band is absent in the 559A-X67-H04 and 559A-X67-D03 antibodies, which indicates that these antibodies are intact.

[0938] K_{i,app} values were determined by steady state enzyme kinetics for those that were shown by SDS-PAGE to be not cleaved (Table 5). Interestingly, the P2 position was the only position where amino acid substitutions yielded intact antibody inhibitors of pKal. Of the 14 different mutations that were recovered at the P3 position (Table 5), only one mutant (W to L) was found to be a pKal inhibitor as a Fab but it was subsequently shown to be clipped as an IgG. None of the 16 different mutations at the P1 position (Table 5) were found to be pKal inhibitors. Eight of the 15 different mutations at the P1′ position were found to be inhibitors of pKal as a Fab but all were clipped as an IgG. Consequently, only mutations at the P2 position led to antibody inhibitors that were not clipped during expression. Of the 16 different mutations that were recovered at the P2 position (Table 5), eight mutants were found to be a pKal inhibitor as a Fab but it was subsequently shown to be clipped as an IgG. Four mutants at the P2 position were found to have subnanomolar K_{i,app} values: X67-G04 (F to A), X67-C03 (F to M), X67-F01 (F to Q) and X67-D03 (F to N). The antibody with the highest potency is X67-D03 (K_{i,app}=0.1 nM). The two antibodies shown in Table 6 were not cleaved when expressed as IgGs and were found to inhibit pKal with a subnanomolar K_{i,app}.

[0939] DNA and amino acid sequence alignments of the light chains of nongermlined (X63-G06) and germlined, codon optimized (X81-B01) versions of the same antibody discovered using ROLIC affinity maturation are shown in FIGS. 4 and 5, respectively. DNA and amino acid sequence alignments of the heavy chains of nongermlined (X63-G06) and germlined, codon optimized (X81-B01) versions of the same antibody discovered using ROLIC affinity maturation are shown in FIGS. 6 and 7, respectively.

TABLE 5
HV-CDR3 Sequences Obtained from “CDR3 by Design” Library*

| | | | | | Ki, app |
|---|---|---|---|---|---|
| | | | Inhibit | Intact | as an |
| Mutation | Antibody | | as a | as an | IgG |
| Site | I.D. | HV-CDR3 | Fab? | IgG? | (nM) |
| Parental | X69-C09 | GGLLLWFRELKSNYFDY | Yes | No | 0.2 |
| P3 | X68-E07 | GGLLLAFRELKSNYFDY | No | n/a | n/a |
| P3 | X68-E12 | GGLLLCFRELKSNYFDY | No | n/a | n/a |
| P3 | X68-A03 | GGLLLDFRELKSNYFDY | No | n/a | n/a |
| P3 | X68-E03 | GGLLLEFRELKSNYFDY | No | n/a | n/a |
| P3 | X68-A12 | GGLLLGFRELKSNYFDY | No | n/a | n/a |
| P3 | X68-D11 | GGLLLKFRELKSNYFDY | No | n/a | n/a |
| P3 | X68-E01 | GGLLLLFRELKSNYFDY | Yes | No | n/a |
| P3 | X68-F05 | GGLLLMFRELKSNYFDY | No | n/a | n/a |
| P3 | X68-D10 | GGLLLPFRELKSNYFDY | No | n/a | n/a |
| P3 | X68-F10 | GGLLLQFRELKSNYFDY | No | n/a | n/a |
| P3 | X68-G01 | GGLLLRFRELKSNYFDY | No | n/a | n/a |
| P3 | X68-G05 | GGLLLSFRELKSNYFDY | No | n/a | n/a |
| P3 | X68-F12 | GGLLLTFRELKSNYFDY | No | n/a | n/a |
| P3 | X68-H04 | GGLLLVFRELKSNYFDY | No | n/a | n/a |
| P2 | X67-G04 | GGLLLWARELKSNYFDY | Yes | Yes | 0.35 |
| P2 | X67-G01 | GGLLLWCRELKSNYFDY | No | n/a | n/a |
| P2 | X67-E04 | GGLLLWDRELKSNYFDY | Yes | Yes | 1.3 |
| P2 | X67-H04 | GGLLLWERELKSNYFDY | Yes | Yes | 3.6 |
| P2 | X67-C09 | GGLLLWGRELKSNYFDY | Yes | Yes | 8.6 |
| P2 | X67-B04 | GGLLLWKRELKSNYFDY | Yes | No | n/a |
| P2 | X67-G09 | GGLLLWLRELKSNYFDY | Yes | No | n/a |
| P2 | X67-C03 | GGLLLWMRELKSNYFDY | Yes | Yes | 0.7 |
| P2 | X67-D03 | GGLLLWNRELKSNYFDY | Yes | Yes | 0.1 |
| P2 | X67-B05 | GGLLLWPRELKSNYFDY | No | n/a | n/a |
| P2 | X67-F01 | GGLLLWQRELKSNYFDY | Yes | Yes | 0.9 |
| P2 | X67-G05 | GGLLLWRRELKSNYFDY | Yes | No | n/a |
| P2 | X67-B03 | GGLLLWSRELKSNYFDY | Yes | Yes | 2.1 |
| P2 | X67-F10 | GGLLLWTRELKSNYFDY | Yes | Yes | 1.3 |
| P2 | X67-H01 | GGLLLWWRELKSNYFDY | Yes | No | n/a |
| P2 | X67-F08 | GGLLLWYRELKSNYFDY | Yes | No | n/a |
| P1 | X66-E09 | GGLLLWFAELKSNYFDY | No | n/a | n/a |
| P1 | X66-B05 | GGLLLWFCELKSNYFDY | No | n/a | n/a |
| P1 | X66-D03 | GGLLLWFEELKSNYFDY | No | n/a | n/a |
| P1 | X66-H04 | GGLLLWFFELKSNYFDY | No | n/a | n/a |
| P1 | X66-H02 | GGLLLWFGELKSNYFDY | No | n/a | n/a |
| P1 | X66-C11 | GGLLLWFHELKSNYFDY | No | n/a | n/a |
| P1 | X66-A07 | GGLLLWFKELKSNYFDY | No | n/a | n/a |
| P1 | X66-C03 | GGLLLWFLELKSNYFDY | No | n/a | n/a |
| P1 | X66-G05 | GGLLLWFMELKSNYFDY | No | n/a | n/a |
| P1 | X66-F10 | GGLLLWFPELKSNYFDY | No | n/a | n/a |
| P1 | X66-E04 | GGLLLWFQELKSNYFDY | No | n/a | n/a |
| P1 | X66-F01 | GGLLLWFSELKSNYFDY | No | n/a | n/a |
| P1 | X66-H11 | GGLLLWFTELKSNYFDY | No | n/a | n/a |
| P1 | X66-C02 | GGLLLWFVELKSNYFDY | No | n/a | n/a |
| P1 | X66-F09 | GGLLLWFWELKSNYFDY | No | n/a | n/a |
| P1 | X66-G08 | GGLLLWFYELKSNYFDY | No | n/a | n/a |
| P1′ | X69-D08 | GGLLLWFRALKSNYFDY | No | n/a | n/a |
| P1′ | X69-B02 | GGLLLWFRCLKSNYFDY | No | n/a | n/a |
| P1′ | X69-D09 | GGLLLWFRGLKSNYFDY | Yes | No | n/a |
| P1′ | X69-D02 | GGLLLWFRHLKSNYFDY | No | n/a | n/a |
| P1′ | X69-A12 | GGLLLWFRKLKSNYFDY | No | n/a | n/a |
| P1′ | X69-F05 | GGLLLWFRLLKSNYFDY | Yes | No | n/a |
| P1′ | X69-B08 | GGLLLWFRNLKSNYFDY | Yes | No | n/a |
| P1′ | X69-A10 | GGLLLWFRPLKSNYFDY | No | n/a | n/a |
| P1′ | X69-A09 | GGLLLWFRQLKSNYFDY | Yes | No | n/a |
| P1′ | X69-E05 | GGLLLWFRRLKSNYFDY | No | n/a | n/a |
| P1′ | X69-F09 | GGLLLWFRSLKSNYFDY | Yes | No | n/a |
| P1′ | X69-F01 | GGLLLWFRTLKSNYFDY | Yes | No | n/a |
| P1′ | X69-C12 | GGLLLWFRVLKSNYFDY | Yes | No | n/a |
| P1′ | X69-E01 | GGLLLWFRWLKSNYFDY | Yes | No | n/a |
| P1′ | X69-H10 | GGLLLWFRYLKSNYFDY | No | n/a | n/a |

*All of these antibodies are single point mutations of the M142-H08 sequence.

[0940] Amino acid sequences of light chain (LC) and heavy chain (HC) variable domain of pKal antibodies with designed HC CDR3s are shown below.

| X68-E07 LC | |
|---|---|
| QDIQMTQSPS SLSAFVGDRV TITCRASQPI DNYLNWYHQK PGKAPKLLIY AASRLQSGVP | 60 |
| SRLSGSGFGT DFTLTISSLQ PEDFGNYYCQ QSYTVPYTFG GGTKVEIR | 108 |
| X68-E07 HC | |
| EVQLLESGGG LVQPGGSLRL SCAASGFTFS AYSMIWVRQA PGKGLEWVSY IRPSGGRTTY | 60 |
| ADSVKGRFTI SRDNSKNTLY LQMNSLRAED TAVYYCARGG LLLAFRELKS NYFDYWGQGT | 120 |
| LVTVSSASTK GPSVFPLAPS SKS | 143 |
| X68-E12 LC | |
| QDIQMTQSPS SLSAFVGDRV TITCRASQPI DNYLNWYHQK PGKAPKLLIY AASRLQSGVP | 60 |
| SRLSGSGFGT DFTLTISSLQ PEDFGNYYCQ QSYTVPYTFG GGTKVEIR | 108 |
| X68-E12 HC | |
| EVQLLESGGG LVQPGGSLRL SCAASGFTFS AYSMIWVRQA PGKGLEWVSY IRPSGGRTTY | 60 |
| ADSVKGRFTI SRDNSKNTLY LQMNSLRAED TAVYYCARGG LLLCFRELKS NYFDYWGQGT | 120 |
| LVTVSSASTK GPSVFPLAPS SKS | 143 |
| X68-A03 LC | |
| QDIQMTQSPS SLSAFVGDRV TITCRASQPI DNYLNWYHQK PGKAPKLLIY AASRLQSGVP | 60 |
| SRLSGSGFGT DFTLTISSLQ PEDFGNYYCQ QSYTVPYTFG GGTKVEIR | 108 |
| X68-A03 HC | |
| EVQLLESGGG LVQPGGSLRL SCAASGFTFS AYSMIWVRQA PGKGLEWVSY IRPSGGRTTY | 60 |
| ADSVKGRFTI SRDNSKNTLY LQMNSLRAED TAVYYCARGG LLLDFRELKS NYFDYWGQGT | 120 |
| LVTVSSASTK GPSVFPLAPS SKS | 143 |
| X68-E03 LC | |
| QDIQMTQSPS SLSAFVGDRV TITCRASQPI DNYLNWYHQK PGKAPKLLIY AASRLQSGVP | 60 |
| SRLSGSGFGT DFTLTISSLQ PEDFGNYYCQ QSYTVPYTFG GGTKVEIR | 108 |
| X68-E03 HC | |
| EVQLLESGGG LVQPGGSLRL SCAASGFTFS AYSMIWVRQA PGKGLEWVSY IRPSGGRTTY | 60 |
| ADSVKGRFTI SRDNSKNTLY LQMNSLRAED TAVYYCARGG LLLEFRELKS NYFDYWGQGT | 120 |
| LVTVSSASTK GPSVFPLAPS SKS | 143 |
| X68-A12 LC | |
| QDIQMTQSPS SLSAFVGDRV TITCRASQPI DNYLNWYHQK PGKAPKLLIY AASRLQSGVP | 60 |
| SRLSGSGFGT DFTLTISSLQ PEDFGNYYCQ QSYTVPYTFG GGTKVEIR | 108 |
| X68-A12 HC | |
| EVQLLESGGG LVQPGGSLRL SCAASGFTFS AYSMIWVRQA PGKGLEWVSY IRPSGGRTTY | 60 |
| ADSVKGRFTI SRDNSKNTLY LQMNSLRAED TAVYYCARGG LLLGFRELKS NYFDYWGQGT | 120 |
| LVTVSSASTK GPSVFPLAPS SKS | 143 |
| X68-D11 LC | |
| QDIQMTQSPS SLSAFVGDRV TITCRASQPI DNYLNWYHQK PGKAPKLLIY AASRLQSGVP | 60 |
| SRLSGSGFGT DFTLTISSLQ PEDFGNYYCQ QSYTVPYTFG GGTKVEIR | 108 |
| X68-D11 HC | |
| EVQLLESGGG LVQPGGSLRL SCAASGFTFS AYSMIWVRQA PGKGLEWVSY IRPSGGRTTY | 60 |
| ADSVKGRFTI SRDNSKNTLY LQMNSLRAED TAVYYCARGG LLLKFRELKS NYFDYWGQGT | 120 |
| LVTVSSASTK GPSVFPLAPS SKS | 143 |
| X68-E01 LC | |
| QDIQMTQSPS SLSAFVGDRV TITCRASQPI DNYLNWYHQK PGKAPKLLIY AASRLQSGVP | 60 |
| SRLSGSGFGT DFTLTISSLQ PEDFGNYYCQ QSYTVPYTFG GGTKVEIR | 108 |
| X68-E01 HC | |
| EVQLLESGGG LVQPGGSLRL SCAASGFTFS AYSMIWVRQA PGKGLEWVSY IRPSGGRTTY | 60 |
| ADSVKGRFTI SRDNSKNTLY LQMNSLRAED TAVYYCARGG LLLLFRELKS NYFDYWGQGT | 120 |
| LVTVSSASTK GPSVFPLAPS SKS | 143 |
| X68-F05 LC | |
| QDIQMTQSPS SLSAFVGDRV TITCRASQPI DNYLNWYHQK PGKAPKLLIY AASRLQSGVP | 60 |
| SRLSGSGFGT DFTLTISSLQ PEDFGNYYCQ QSYTVPYTFG GGTKVEIR | 108 |
| X68-F05 HC | |
| EVQLLESGGG LVQPGGSLRL SCAASGFTFS AYSMIWVRQA PGKGLEWVSY IRPSGGRTTY | 60 |
| ADSVKGRFTI SRDNSKNTLY LQMNSLRAED TAVYYCARGG LLLMFRELKS NYFDYWGQGT | 120 |
| LVTVSSASTK GPSVFPLAPS SKS | 143 |
| X68-D10 LC | |
| QDIQMTQSPS SLSAFVGDRV TITCRASQPI DNYLNWYHQK PGKAPKLLIY AASRLQSGVP | 60 |
| SRLSGSGFGT DFTLTISSLQ PEDFGNYYCQ QSYTVPYTFG GGTKVEIR | 108 |
| X68-D10 HC | |
| EVQLLESGGG LVQPGGSLRL SCAASGFTFS AYSMIWVRQA PGKGLEWVSY IRPSGGRTTY | 60 |
| ADSVKGRFTI SRDNSKNTLY LQMNSLRAED TAVYYCARGG LLLPFRELKS NYFDYWGQGT | 120 |
| LVTVSSASTK GPSVFPLAPS SKS | 143 |
| X68-F10 LC | |
| QDIQMTQSPS SLSAFVGDRV TITCRASQPI DNYLNWYHQK PGKAPKLLIY AASRLQSGVP | 60 |
| SRLSGSGFGT DFTLTISSLQ PEDFGNYYCQ QSYTVPYTFG GGTKVEIR | 108 |
| X68-F10 HC | |
| EVQLLESGGG LVQPGGSLRL SCAASGFTFS AYSMIWVRQA PGKGLEWVSY IRPSGGRTTY | 60 |
| ADSVKGRFTI SRDNSKNTLY LQMNSLRAED TAVYYCARGG LLLQFRELKS NYFDYWGQGT | 120 |
| LVTVSSASTK GPSVFPLAPS SKS | 143 |
| X68-G01 LC | |
| QDIQMTQSPS SLSAFVGDRV TITCRASQPI DNYLNWYHQK PGKAPKLLIY AASRLQSGVP | 60 |
| SRLSGSGFGT DFTLTISSLQ PEDFGNYYCQ QSYTVPYTFG GGTKVEIR | 108 |
| X68-G01 HC | |
| EVQLLESGGG LVQPGGSLRL SCAASGFTFS AYSMIWVRQA PGKGLEWVSY IRPSGGRTTY | 60 |
| ADSVKGRFTI SRDNSKNTLY LQMNSLRAED TAVYYCARGG LLLRFRELKS NYFDYWGQGT | 120 |
| LVTVSSASTK GPSVFPLAPS SKS | 143 |
| X68-G05 LC | |
| QDIQMTQSPS SLSAFVGDRV TITCRASQPI DNYLNWYHQK PGKAPKLLIY AASRLQSGVP | 60 |
| SRLSGSGFGT DFTLTISSLQ PEDFGNYYCQ QSYTVPYTFG GGTKVEIR | 108 |
| X68-G05 HC | |
| EVQLLESGGG LVQPGGSLRL SCAASGFTFS AYSMIWVRQA PGKGLEWVSY IRPSGGRTTY | 60 |
| ADSVKGRFTI SRDNSKNILY LQMNSLRAED TAVYYCARGG LLLSFRELKS NYFDYWGQGT | 120 |
| LVTVSSASTK GPSVFPLAPS SKS | 143 |
| X68-F12 LC | |
| QDIQMTQSPS SLSAFVGDRV TITCRASQPI DNYLNWYHQK PGKAPKLLIY AASRLQSGVP | 60 |
| SRLSGSGFGT DFTLTISSLQ PEDFGNYYCQ QSYTVPYTFG GGTKVEIR | 108 |
| X68-F12 HC | |
| EVQLLESGGG LVQPGGSLRL SCAASGFTFS AYSMIWVRQA PGKGLEWVSY IRPSGGRTTY | 60 |
| ADSVKGRFTI SRDNSKNTLY LQMNSLRAED TAVYYCARGG LLLTFRELKS NYFDYWGQGT | 120 |
| LVTVSSASTK GPSVFPLAPS SKS | 143 |
| X68-H04 LC | |
| QDIQMTQSPS SLSAFVGDRV TITCRASQPI DNYLNWYHQK PGKAPKLLIY AASRLQSGVP | 60 |
| SRLSGSGFGT DFTLTISSLQ PEDFGNYYCQ QSYTVPYTFG GGTKVEIR | 108 |
| X68-H04 HC | |
| EVQLLESGGG LVQPGGSLRL SCAASGFTFS AYSMIWVRQA PGKGLEWVSY IRPSGGRTTY | 60 |
| ADSVKGRFTI SRDNSKNTLY LQMNSLRAED TAVYYCARGG LLLVFRELKS NYFDYWGQGT | 120 |
| LVTVSSASTK GPSVFPLAPS SKS | 143 |
| X67-G04 LC | |
| QDIQMTQSPS SLSAFVGDRV TITCRASQPI DNYLNWYHQK PGKAPKLLIY AASRLQSGVP | 60 |
| SRLSGSGFGT DFTLTISSLQ PEDFGNYYCQ QSYTVPYTFG GGTKVEIR | 108 |
| X67-G04 HC | |
| EVQLLESGGG LVQPGGSLRL SCAASGFTFS AYSMIWVRQA PGKGLEWVSY IRPSGGRTTY | 60 |
| ADSVKGRFTI SRDNSKNTLY LQMNSLRAED TAVYYCARGG LLLWARELKS NYFDYWGQGT | 120 |
| LVTVSSASTK GPSVFPLAPS SKS | 143 |
| X67-G01 LC | |
| QDIQMTQSPS SLSAFVGDRV TITCRASQPI DNYLNWYHQK PGKAPKLLIY AASRLQSGVP | 60 |
| SRLSGSGFGT DFTLTISSLQ PEDFGNYYCQ QSYTVPYTFG GGTKVEIR | 108 |
| X67-G01 HC | |
| EVQLLESGGG LVQPGGSLRL SCAASGFTFS AYSMIWVRQA PGKGLEWVSY IRPSGGRTTY | 60 |
| ADSVKGRFTI SRDNSKNTLY LQMNSLRAED TAVYYCARGG LLLWCRELKS NYFDYWGQGT | 120 |
| LVTVSSASTK GPSVFPLAPS SKS | 143 |
| X67-E04 LC | |
| QDIQMTQSPS SLSAFVGDRV TITCRASQPI DNYLNWYHQK PGKAPKLLIY AASRLQSGVP | 60 |
| SRLSGSGFGT DFTLTISSLQ PEDFGNYYCQ QSYTVPYTFG GGTKVEIR | 108 |
| X67-E04 HC | |
| EVQLLESGGG LVQPGGSLRL SCAASGFTFS AYSMIWVRQA PGKGLEWVSY IRPSGGRTTY | 60 |
| ADSVKGRFTI SRDNSKNTLY LQMNSLRAED TAVYYCARGG LLLWDRELKS NYFDYWGQGT | 120 |
| LVTVSSASTK GPSVFPLAPS SKS | 143 |
| X67-H04 LC | |
| QDIQMTQSPS SLSAFVGDRV TITCRASQPI DNYLNWYHQK PGKAPKLLIY AASRLQSGVP | 60 |
| SRLSGSGFGT DFTLTISSLQ PEDFGNYYCQ QSYTVPYTFG GGTKVEIR | 108 |
| X67-H04 HC | |
| EVQLLESGGG LVQPGGSLRL SCAASGFTFS AYSMIWVRQA PGKGLEWVSY IRPSGGRTTY | 60 |
| ADSVKGRFTI SRDNSKNTLY LQMNSLRAED TAVYYCARGG LLLWERELKS NYFDYWGQGT | 120 |
| LVTVSSASTK GPSVFPLAPS SKS | 143 |
| X66-E09 LC | |
| QDIQMTQSPS SLSAFVGDRV TITCRASQPI DNYLNWYHQK PGKAPKLLIY AASRLQSGVP | 60 |
| SRLSGSGFGT DFTLTISSLQ PEDFGNYYCQ QSYTVPYTFG GGTKVEIR | 108 |
| X66-E09 HC | |
| EVQLLESGGG LVQPGGSLRL SCAASGFTFS AYSMIWVRQA PGKGLEWVSY IRPSGGRTTY | 60 |
| ADSVKGRFTI SRDNSKNTLY LQMNSLRAED TAVYYCARGG LLLWFAELKS NYFDYWGQGT | 120 |
| LVTVSSASTK GPSVFPLAPS SKS | 143 |
| X66-B05 LC | |
| QDIQMTQSPS SLSAFVGDRV TITCRASQPI DNYLNWYHQK PGKAPKLLIY AASRLQSGVP | 60 |
| SRLSGSGFGT DFTLTISSLQ PEDFGNYYCQ QSYTVPYTFG GGTKVEIR | 108 |
| X66-B05 HC | |
| EVQLLESGGG LVQPGGSLRL SCAASGFTFS AYSMIWVRQA PGKGLEWVSY IRPSGGRTTY | 60 |
| ADSVKGRFTI SRDNSKNTLY LQMNSLRAED TAVYYCARGG LLLWFCELKS NYFDYWGQGT | 120 |
| LVTVSSASTK GPSVFPLAPS SKS | 143 |
| X66-D03 LC | |
| QDIQMTQSPS SLSAFVGDRV TITCRASQPI DNYLNWYHQK PGKAPKLLIY AASRLQSGVP | 60 |
| SRLSGSGFGT DFTLTISSLQ PEDFGNYYCQ QSYTVPYTFG GGTKVEIR | 108 |
| X66-D03 HC | |
| EVQLLESGGG LVQPGGSLRL SCAASGFTFS AYSMIWVRQA PGKGLEWVSY IRPSGGRTTY | 60 |
| ADSVKGRFTI SRDNSKNTLY LQMNSLRAED TAVYYCARGG LLLWFEELKS NYFDYWGQGT | 120 |
| LVTVSSASTK GPSVFPLAPS SKS | 143 |
| X66-H04 LC | |
| QDIQMTQSPS SLSAFVGDRV TITCRASQPI DNYLNWYHQK PGKAPKLLIY AASRLQSGVP | 60 |
| SRLSGSGFGT DFTLTISSLQ PEDFGNYYCQ QSYTVPYTFG GGTKVEIR | 108 |
| X66-H04 HC | |
| EVQLLESGGG LVQPGGSLRL SCAASGFTFS AYSMIWVRQA PGKGLEWVSY IRPSGGRTTY | 60 |
| ADSVKGRFTI SRDNSKNTLY LQMNSLRAED TAVYYCARGG LLLWFFELKS NYFDYWGQGT | 120 |
| LVTVSSASTK GPSVFPLAPS SKS | 143 |
| X66-H02 LC | |
| QDIQMTQSPS SLSAFVGDRV TITCRASQPI DNYLNWYHQK PGKAPKLLIY AASRLQSGVP | 60 |
| SRLSGSGFGT DFTLTISSLQ PEDFGNYYCQ QSYTVPYTFG GGTKVEIR | 108 |
| X66-H02 HC | |
| EVQLLESGGG LVQPGGSLRL SCAASGFTFS AYSMIWVRQA PGKGLEWVSY IRPSGGRTTY | 60 |
| ADSVKGRFTI SRDNSKNTLY LQMHSLRAED TAVYYCARGG LLLWFGELKS NYFDYWGQGT | 120 |
| LVTVSSASTK GPSVFPLAPS SKS | 143 |
| X66-C11 LC | |
| QDIQMTQSPS SLSAFVGDRV TITCRASQPI DNYLNWYHQK PGKAPKLLIY AASRLQSGVP | 60 |
| SRLSGSGFGT DFTLTISSLQ PEDFGNYYCQ QSYTVPYTFG GGTKVEIR | 108 |
| X66-C11 HC | |
| EVQLLESGGG LVQPGGSLRL SCAASGFTFS AYSMIWVRQA PGKGLEWVSY IRPSGGRTTY | 60 |
| ADSVKGRFTI SRDNSKNTLY LQMNSLRAED TAVYYCARGG LLLWFHELKS NYFDYWGQGT | 120 |
| LVTVSSASTK GPSVFPLAPS SKS | 143 |
| X66-A07 LC | |
| QDIQMTQSPS SLSAFVGDRV TITCRASQPI DNYLNWYHQK PGKAPKLLIY AASRLQSGVP | 60 |
| SRLSGSGFGT DFTLTISSLQ PEDFGNYYCQ QSYTVPYTFG GGTKVEIR | 108 |
| X66-A07 HC | |
| EVQLLESGGG LVQPGGSLRL SCAASGFTFS AYSMIWVRQA PGKGLEWVSY IRPSGGRTTY | 60 |
| ADSVKGRFTI SRDNSKNTLY LQMNSLRAED TAVYYCARGG LLLWFKELKS NYFDYWGQGT | 120 |
| LVTVSSASTK GPSVFPLAPS SKS | 143 |
| X66-C03 LC | |
| QDIQMTQSPS SLSAFVGDRV TITCRASQPI DNYLNWYHQK PGKAPKLLIY AASRLQSGVP | 60 |
| SRLSGSGFGT DFTLTISSLQ PEDFGNYYCQ QSYTVPYTFG GGTKVEIR | 108 |
| X66-C03 HC | |
| EVQLLESGGG LVQPGGSLRL SCAASGFTFS AYSMIWVRQA PGKGLEWVSY IRPSGGRTTY | 60 |
| ADSVKGRFTI SRDNSKNTLY LQMNSLRAED TAVYYCARGG LLLWFLELKS NYFDYWGQGT | 120 |
| LVTVSSASTK GPSVFPLAPS SKS | 143 |
| X66-G05 LC | |
| QDIQMTQSPS SLSAFVGDRV TITCRASQPI DNYLNWYHQK PGKAPKLLIY AASRLQSGVP | 60 |
| SRLSGSGFGT DFTLTISSLQ PEDFGNYYCQ QSYTVPYTFG GGTKVEIR | 108 |
| X66-G05 HC | |
| EVQLLESGGG LVQPGGSLRL SCAASGFTFS AYSMIWVRQA PGKGLEWVSY IRPSGGRTTY | 60 |
| ADSVKGRFTI SRDNSKNTLY LQMNSLRAED TAVYYCARGG LLLWFMELKS NYFDYWGQGT | 120 |
| LVTVSSASTK GPSVFPLAPS SKS | 143 |
| X66-F10 LC | |
| QDIQMTQSPS SLSAFVGDRV TITCRASQPI DNYLNWYHQK PGKAPKLLIY AASRLQSGVP | 60 |
| SRLSGSGFGT DFTLTISSLQ PEDFGNYYCQ QSYTVPYTFG GGTKVEIR | 108 |
| X66-F10 HC | |
| EVQLLESGGG LVQPGGSLRL SCAASGFTFS AYSMIWVRQA PGKGLEWVSY IRPSGGRTTY | 60 |
| ADSVKGRFTI SRDNSKNTLY LQMNSLRAED TAVYYCARGG LLLWFPELKS NYFDYWGQGT | 120 |
| LVTVSSASTK GPSVFPLAPS SKS | 143 |
| X66-E04 LC | |
| QDIQMTQSPS SLSAFVGDRV TITCRASQPI DNYLNWYHQK PGKAPKLLIY AASRLQSGVP | 60 |
| SRLSGSGFGT DFTLTISSLQ PEDFGNYYCQ QSYTVPYTFG GGTKVEIR | 108 |
| X66-E04 HC | |
| EVQLLESGGG LVQPGGSLRL SCAASGFTFS AYSMIWVRQA PGKGLEWVSY IRPSGGRTTY | 60 |
| ADSVKGRFTI SRDNSKNTLY LQMNSLRAED TAVYYCARGG LLLWFQELKS NYFDYWGQGT | 120 |
| LVTVSSASTK GPSVFPLAPS SKS | 143 |
| X69-D08 LC | |
| QDIQMTQSPS SLSAFVGDRV TITCRASQPI DNYLNWYHQK PGKAPKLLIY AASRLQSGVP | 60 |
| SRLSGSGFGT DFTLTISSLQ PEDFGNYYCQ QSYTVPYTFG GGTKVEIR | 108 |
| X69-D08 HC | |
| EVQLLESGGG LVQPGGSLRL SCAASGFTFS AYSMIWVRQA PGKGLEWVSY IRPSGGRTTY | 60 |
| ADSVKGRFTI SRDNSKNTLY LQMNSLRAED TAVYYCARGG LLLWFRALKS NYFDYWGQGT | 120 |
| LVTVSSASTK GPSVFPLAPS SKS | 143 |
| X69-B02 LC | |
| QDIQMTQSPS SLSAFVGDRV TITCRASQPI DNYLNWYHQK PGKAPKLLIY AASRLQSGVP | 60 |
| SRLSGSGFGT DFTLTISSLQ PEDFGNYYCQ QSYTVPYTFG GGTKVEIR | 108 |
| X69-B02 HC | |
| EVQLLESGGG LVQPGGSLRL SCAASGFTFS AYSMIWVRQA PGKGLEWVSY IRPSGGRTTY | 60 |
| ADSVKGRFTI SRDNSKNTLY LQMNSLRAED TAVYYCARGG LLLWFRCLKS NYFDYWGQGT | 120 |
| LVTVSSASTK GPSVFPLAPS SKS | 143 |
| X69-C09 LC | |
| QDIQMTQSPS SLSAFVGDRV TITCRASQPI DNYLNWYHQK PGKAPKLLIY AASRLQSGVP | 60 |
| SRLSGSGFGT DFTLTISSLQ PEDFGNYYCQ QSYTVPYTFG GGTKVEIR | 108 |
| X69-C09 HC | |
| EVQLLESGGG LVQPGGSLRL SCAASGFTFS AYSMIWVRQA PGKGLEWVSY IRPSGGRTTY | 60 |
| ADSVKGRFTI SRDNSKNTLY LQMNSLRAED TAVYYCARGG LLLWFRELKS NYFDYWGQGT | 120 |
| LVTVSSASTK GPSVFPLAPS SKS | 143 |
| X69-D09 LC | |
| QDIQMTQSPS SLSAFVGDRV TITCRASQPI DNYLNWYHQK PGKAPKLLIY AASRLQSGVP | 60 |
| SRLSGSGFGT DFTLTISSLQ PEDFGNYYCQ QSYTVPYTFG GGTKVEIR | 108 |
| X69-D09 HC | |
| EVQLLESGGG LVQPGGSLRL SCAASGFTFS AYSMIWVRQA PGKGLEWVSY IRPSGGRTTY | 60 |
| ADSVKGRFTI SRDNSKNTLY LQMNSLRAED TAVYYCARGG LLLWFRGLKS NYFDYWGQGT | 120 |
| LVTVSSASTK GPSVFPLAPS SKS | 143 |
| X69-D02 LC | |
| QDIQMTQSPS SLSAFVGDRV TITCRASQPI DNYLNWYHQK PGKAPKLLIY AASRLQSGVP | 60 |
| SRLSGSGFGT DFTLTISSLQ PEDFGNYYCQ QSYTVPYTFG GGTKVEIR | 108 |
| X69-D02 HC | |
| EVQLLESGGG LVQPGGSLRL SCAASGFTFS AYSMIWVRQA PGKGLEWVSY IRPSGGRTTY | 60 |
| ADSVKGRFTI SRDNSKNTLY LQMNSLRAED TAVYYCARGG LLLWFRHLKS NYFDYWGQGT | 120 |
| LVTVSSASTK GPSVFPLAPS SKS | 143 |
| X69-A12 LC | |
| QDIQMTQSPS SLSAFVGDRV TITCRASQPI DNYLNWYHQK PGKAPKLLIY AASRLQSGVP | 60 |
| SRLSGSGFGT DFTLTISSLQ PEDFGNYYCQ QSYTVPYTFG GGTKVEIR | 108 |
| X69-A12 HC | |
| EVQLLESGGG LVQPGGSLRL SCAASGFTFS AYSMIWVRQA PGKGLEWVSY IRPSGGRTTY | 60 |
| ADSVKGRFTI SRDNSKNTLY LQMNSLRAED TAVYYCARGG LLLWFRKLKS NYFDYWGQGT | 120 |
| LVTVSSASTK GPSVFPLAPS SKS | 143 |
| X69-F05 LC | |
| QDIQMTQSPS SLSAFVGDRV TITCRASQPI DNYLNWYHQK PGKAPKLLIY AASRLQSGVP | 60 |
| SRLSGSGFGT DFTLTISSLQ PEDFGNYYCQ QSYTVPYTFG GGTKVEIR | 108 |
| X69-F05 HC | |
| EVQLLESGGG LVQPGGSLRL SCAASGFTFS AYSMIWVRQA PGKGLEWVSY IRPSGGRTTY | 60 |
| ADSVKGRFTI SRDNSKNTLY LQMNSLRAED TAVYYCARGG LLLWFRLLKS NYFDYWGQGT | 120 |
| LVTVSSASTK GPSVFPLAPS SKS | 143 |
| X69-B08 LC | |
| QDIQMTQSPS SLSAFVGDRV TITCRASQPI DNYLNWYHQK PGKAPKLLIY AASRLQSGVP | 60 |
| SRLSGSGFGT DFTLTISSLQ PEDFGNYYCQ QSYTVPYTFG GGTKVEIR | 108 |
| X69-B08 HC | |
| EVQLLESGGG LVQPGGSLRL SCAASGFTFS AYSMIWVRQA PGKGLEWVSY IRPSGGRTTY | 60 |
| ADSVKGRFTI SRDNSKNTLY LQMNSLRAED TAVYYCARGG LLLWFRNLKS NYFDYWGQGT | 120 |
| LVTVSSASTK GPSVFPLAPS SKS | 143 |
| X69-A10 LC | |
| QDIQMTQSPS SLSAFVGDRV TITCRASQPI DNYLNWYHQK PGKAPKLLIY AASRLQSGVP | 60 |
| SRLSGSGFGT DFTLTISSLQ PEDFGNYYCQ QSYTVPYTFG GGTKVEIR | 108 |
| X69-A10 HC | |
| EVQLLESGGG LVQPGGSLRL SCAASGFTFS AYSMIWVRQA PGKGLEWVSY IRPSGGRTTY | 60 |
| ADSVKGRFTI SRDNSKNTLY LQMNSLRAED TAVYYCARGG LLLWFRPLKS NYFDYWGQGT | 120 |
| LVTVSSASTK GPSVFPLAPS SKS | 143 |
| X69-A09 LC | |
| QDIQMTQSPS SLSAFVGDRV TITCRASQPI DNYLNWYHQK PGKAPKLLIY AASRLQSGVP | 60 |
| SRLSGSGFGT DFTLTISSLQ PEDFGNYYCQ QSYTVPYTFG GGTKVEIR | 108 |
| X69-A09 HC | |
| EVQLLESGGG LVQPGGSLRL SCAASGFTFS AYSMIWVRQA PGKGLEWVSY IRPSGGRTTY | 60 |
| ADSVKGRFTI SRDNSKNTLY LQMNSLRAED TAVYYCARGG LLLWFRQLKS NYFDYWGQGT | 120 |
| LVTVSSASTK GPSVFPLAPS SKS | 143 |
| X69-E05 LC | |
| QDIQMTQSPS SLSAFVGDRV TITCRASQPI DNYLNWYHQK PGKAPKLLIY AASRLQSGVP | 60 |
| SRLSGSGFGT DFTLTISSLQ PEDFGNYYCQ QSYTVPYTFG GGTKVEIR | 108 |
| X69-E05 HC | |
| EVQLLESGGG LVQPGGSLRL SCAASGFTFS AYSMIWVRQA PGKGLEWVSY IRPSGGRTTY | 60 |
| ADSVKGRFTI SRDNSKNTLY LQMNSLRAED TAVYYCARGG LLLWFRRLKS NYFDYWGQGT | 120 |
| LVTVSSASTK GPSVFPLAPS SKS | 143 |
| X69-F09 LC | |
| QDIQMTQSPS SLSAFVGDRV TITCRASQPI DNYLNWYHQK PGKAPKLLIY AASRLQSGVP | 60 |
| SRLSGSGFGT DFTLTISSLQ PEDFGNYYCQ QSYTVPYTFG GGTKVEIR | 108 |
| X69-F09 HC | |
| EVQLLESGGG LVQPGGSLRL SCAASGFTFS AYSMIWVRQA PGKGLEWVSY IRPSGGRTTY | 60 |
| ADSVKGRFTI SRDNSKNTLY LQMNSLRAED TAVYYCARGG LLLWFRSLKS NYFDYWGQGT | 120 |
| LVTVSSASTK GPSVFPLAPS SKS | 143 |
| X69-F01 LC | |
| QDIQMTQSPS SLSAFVGDRV TITCRASQPI DNYLNWYHQK PGKAPKLLIY AASRLQSGVP | 60 |
| SRLSGSGFGT DFTLTISSLQ PEDFGNYYCQ QSYTVPYTFG GGTKVEIR | 108 |
| X69-F01 HC | |
| EVQLLESGGG LVQPGGSLRL SCAASGFTFS AYSMIWVRQA PGKGLEWVSY IRPSGGRTTY | 60 |
| ADSVKGRFTI SRDNSKNTLY LQMNSLRAED TAVYYCARGG LLLWFRTLKS NYFDYWGQGT | 120 |
| LVTVSSASTK GPSVFPLAPS SKS | 143 |
| X69-C12 LC | |
| QDIQMTQSPS SLSAFVGDRV TITCRASQPI DNYLNWYHQK PGKAPKLLIY AASRLQSGVP | 60 |
| SRLSGSGFGT DFTLTISSLQ PEDFGNYYCQ QSYTVPYTFG GGTKVEIR | 108 |
| X69-C12 HC | |
| EVQLLESGGG LVQPGGSLRL SCAASGFTFS AYSMIWVRQA PGKGLEWVSY IRPSGGRTTY | 60 |
| ADSVKGRFTI SRDNSKNTLY LQMNSLRAED TAVYYCARGG LLLWFRVLKS NYFDYWGQGT | 120 |
| LVTVSSASTK GPSVFPLAPS SKS | 143 |
| X69-E01 LC | |
| QDIQMTQSPS SLSAFVGDRV TITCRASQPI DNYLNWYHQK PGKAPKLLIY AASRLQSGVP | 60 |
| SRLSGSGFGT DFTLTISSLQ PEDFGNYYCQ QSYTVPYTFG GGTKVEIR | 108 |
| X69-E01 HC | |
| EVQLLESGGG LVQPGGSLRL SCAASGFTFS AYSMIWVRQA PGKGLEWVSY IRPSGGRTTY | 60 |
| ADSVKGRFTI SRDNSKNTLY LQMNSLRAED TAVYYCARGG LLLWFRWLKS NYFDYWGQGT | 120 |
| LVTVSSASTK GPSVFPLAPS SKS | 143 |
| X69-H10 LC | |
| QDIQMTQSPS SLSAFVGDRV TITCRASQPI DNYLNWYHQK PGKAPKLLIY AASRLQSGVP | 60 |
| SRLSGSGFGT DFTLTISSLQ PEDFGNYYCQ QSYTVPYTFG GGTKVEIR | 108 |
| X69-H10 HC | |
| EVQLLESGGG LVQPGGSLRL SCAASGFTFS AYSMIWVRQA PGKGLEWVSY IRPSGGRTTY | 60 |
| ADSVKGRFTI SRDNSKNTLY LQMNSLRAED TAVYYCARGG LLLWFRYLKS NYFDYWGQGT | 120 |
| LVTVSSASTK GPSVFPLAPS SKS | 143 |
| X66-F01 LC | |
| QDIQMTQSPS SLSAFVGDRV TITCRASQPI DNYLNWYHQK PGKAPKLLIY AASRLQSGVP | 60 |
| SRLSGSGFGT DFTLTISSLQ PEDFGNYYCQ QSYTVPYTFG GGTKVEIR | 108 |
| X66-F01 HC | |
| EVQLLESGGG LVQPGGSLRL SCAASGFTFS AYSMIWVRQA PGKGLEWVSY IRPSGGRTTY | 60 |
| ADSVKGRFTI SRDNSKNTLY LQMNSLRAED TAVYYCARGG LLLWFSELKS NYFDYWGQGT | 120 |
| LVTVSSASTK GPSVFPLAPS SKS | 143 |
| X66-H11 LC | |
| QDIQMTQSPS SLSAFVGDRV TITCRASQPI DNYLNWYHQK PGKAPKLLIY AASRLQSGVP | 60 |
| SRLSGSGFGT DFTLTISSLQ PEDFGNYYCQ QSYTVPYTFG GGTKVEIR | 108 |
| X66-H11 HC | |
| EVQLLESGGG LVQPGGSLRL SCAASGFTFS AYSMIWVRQA PGKGLEWVSY IRPSGGRTTY | 60 |
| ADSVKGRFTI SRDNSKNTLY LQMNSLRAED TAVYYCARGG LLLWFTELKS NYFDYWGQGT | 120 |
| LVTVSSASTK GPSVFPLAPS SKS | 143 |
| X66-C02 LC | |
| QDIQMTQSPS SLSAFVGDRV TITCRASQPI DNYLNWYHQK PGKAPKLLIY AASRLQSGVP | 60 |
| SRLSGSGFGT DFTLTISSLQ PEDFGNYYCQ QSYTVPYTFG GGTKVEIR | 108 |
| X66-C02 HC | |
| EVQLLESGGG LVQPGGSLRL SCAASGFTFS AYSMIWVRQA PGKGLEWVSY IRPSGGRTTY | 60 |
| ADSVKGRFTI SRDNSKNTLY LQMNSLRAED TAVYYCARGG LLLWFVELKS NYFDYWGQGT | 120 |
| LVTVSSASTK GPSVFPLAPS SKS | 143 |
| X66-F09 LC | |
| QDIQMTQSPS SLSAFVGDRV TITCRASQPI DNYLNWYHQK PGKAPKLLIY AASRLQSGVP | 60 |
| SRLSGSGFGT DFTLTISSLQ PEDFGNYYCQ QSYTVPYTFG GGTKVEIR | 108 |
| X66-F09 HC | |
| EVQLLESGGG LVQPGGSLRL SCAASGFTFS AYSMIWVRQA PGKGLEWVSY IRPSGGRTTY | 60 |
| ADSVKGRFTI SRDNSKNTLY LQMNSLRAED TAVYYCARGG LLLWFWELKS NYFDYWGQGT | 120 |
| LVTVSSASTK GPSVFPLAPS SKS | 143 |
| X66-G08 LC | |
| QDIQMTQSPS SLSAFVGDRV TITCRASQPI DNYLNWYHQK PGKAPKLLIY AASRLQSGVP | 60 |
| SRLSGSGFGT DFTLTISSLQ PEDFGNYYCQ QSYTVPYTFG GGTKVEIR | 108 |
| X66-G08 HC | |
| EVQLLESGGG LVQPGGSLRL SCAASGFTFS AYSMIWVRQA PGKGLEWVSY IRPSGGRTTY | 60 |
| ADSVKGRFTI SRDNSKNTLY LQMNSLRAED TAVYYCARGG LLLWFYELKS NYFDYWGQGT | 120 |
| LVTVSSASTK GPSVFPLAPS SKS | 143 |
| X67-C09 LC | |
| QDIQMTQSPS SLSAFVGDRV TITCRASQPI DNYLNWYHQK PGKAPKLLIY AASRLQSGVP | 60 |
| SRLSGSGFGT DFTLTISSLQ PEDFGNYYCQ QSYTVPYTFG GGTKVEIR | 108 |
| X67-C09 HC | |
| EVQLLESGGG LVQPGGSLRL SCAASGFTFS AYSMIWVRQA PGKGLEWVSY IRPSGGRTTY | 60 |
| ADSVKGRFTI SRDNSKNTLY LQMNSLRAED TAVYYCARGG LLLWGRELKS NYFDYWGQGT | 120 |
| LVTVSSASTK GPSVFPLAPS SKS | 143 |
| X67-B04 LC | |
| QDIQMTQSPS SLSAFVGDRV TITCRASQPI DNYLNWYHQK PGKAPKLLIY AASRLQSGVP | 60 |
| SRLSGSGFGT DFTLTISSLQ PEDFGNYYCQ QSYTVPYTFG GGTKVEIR | 108 |
| X67-B04 HC | |
| EVQLLESGGG LVQPGGSLRL SCAASGFTFS AYSMIWVRQA PGKGLEWVSY IRPSGGRTTY | 60 |
| ADSVKGRFTI SRDNSKNTLY LQMNSLRAED TAVYYCARGG LLLWKRELKS NYFDYWGQGT | 120 |
| LVTVSSASTK GPSVFPLAPS SKS | 143 |
| X67-G09 LC | |
| QDIQMTQSPS SLSAFVGDRV TITCRASQPI DNYLNWYHQK PGKAPKLLIY AASRLQSGVP | 60 |
| SRLSGSGFGT DFTLTISSLQ PEDFGNYYCQ QSYTVPYTFG GGTKVEIR | 108 |
| X67-G09 HC | |
| EVQLLESGGG LVQPGGSLRL SCAASGFTFS AYSMIWVRQA PGKGLEWVSY | 60 |
| ADSVKGRFTI SRDNSKNTLY LQMNSLRAED TAVYYCARGG LLLWLRELKS NYFDYWGQGT | 120 |
| LVTVSSASTK GPSVFPLAPS SKS | 143 |
| X67-C03 LC | |
| QDIQMTQSPS SLSAFVGDRV TITCRASQPI DNYLNWYHQK PGKAPKLLIY AASRLQSGVP | 60 |
| SRLSGSGFGT DFTLTISSLQ PEDFGNYYCQ QSYTVPYTFG GGTKVEIR | 108 |
| X67-C03 HC | |
| EVQLLESGGG LVQPGGSLRL SCAASGFTFS AYSMIWVRQA PGKGLEWVSY IRPSGGRTTY | 60 |
| ADSVKGRFTI SRDNSKNTLY LQMNSLRAED TAVYYCARGG LLLWMRELKS NYFDYWGQGT | 120 |
| LVTVSSASTK GPSVFPLAPS SKS | 143 |
| X67-D03 LC | |
| QDIQMTQSPS SLSAFVGDRV TITCRASQPI DNYLNWYHQK PGKAPKLLIY AASRLQSGVP | 60 |
| SRLSGSGFGT DFTLTISSLQ PEDFGNYYCQ QSYTVPYTFG GGTKVEIR | 108 |
| X67-D03 HC | |
| EVQLLESGGG LVQPGGSLRL SCAASGFTFS AYSMIWVRQA PGKGLEWVSY IRPSGGRTTY | 60 |
| ADSVKGRFTI SRDNSKNTLY LQMNSLRAED TAVYYCARGG LLLWNRELKS NYFDYWGQGT | 120 |
| LVTVSSASTK GPSVFPLAPS SKS | 143 |
| X67-B05 LC | |
| QDIQMTQSPS SLSAFVGDRV TITCRASQPI DNYLNWYHQK PGKAPKLLIY AASRLQSGVP | 60 |
| SRLSGSGFGT DFTLTISSLQ PEDFGNYYCQ QSYTVPYTFG GGTKVEIR | 108 |
| X67-B05 HC | |
| EVQLLESGGG LVQPGGSLRL SCAASGFTFS AYSMIWVRQA PGKGLEWVSY IRPSGGRTTY | 60 |
| ADSVKGRFTI SRDNSKNTLY LQMNSLRAED TAVYYCARGG LLLWPRELKS NYFDYWGQGT | 120 |
| LVTVSSASTK GPSVFPLAPS SKS | 143 |
| X67-F01 LC | |
| QDIQMTQSPS SLSAFVGDRV TITCRASQPI DNYLNWYHQK PGKAPKLLIY AASRLQSGVP | 60 |
| SRLSGSGFGT DFTLTISSLQ PEDFGNYYCQ QSYTVPYTFG GGTKVEIR | 108 |
| X67-F01 HC | |
| EVQLLESGGG LVQPGGSLRL SCAASGFTFS AYSMIWVRQA PGKGLEWVSY IRPSGGRTTY | 60 |
| ADSVKGRFTI SRDNSKNTLY LQMNSLRAED TAVYYCARGG LLLWQRELKS NYFDYWGQGT | 120 |
| LVTVSSASTK GPSVFPLAPS SKS | 143 |
| X67-G05 LC | |
| QDIQMTQSPS SLSAFVGDRV TITCRASQPI DNYLNWYHQK PGKAPKLLIY AASRLQSGVP | 60 |
| SRLSGSGFGT DFTLTISSLQ PEDFGNYYCQ QSYTVPYTFG GGTKVEIR | 108 |
| X67-G05 HC | |
| EVQLLESGGG LVQPGGSLRL SCAASGFTFS AYSMIWVRQA PGKGLEWVSY IRPSGGRTTY | 60 |
| ADSVKGRFTI SRDNSKNTLY LQMNSLRAED TAVYYCARGG LLLWRRELKS NYFDYWGQGT | 120 |
| LVTVSSASTK GPSVFPLAPS SKS | 143 |
| X67-B03 LC | |
| QDIQMTQSPS SLSAFVGDRV TITCRASQPI DNYLNWYHQK PGKAPKLLIY AASRLQSGVP | 60 |
| SRLSGSGFGT DFTLTISSLQ PEDFGNYYCQ QSYTVPYTFG GGTKVEIR | 108 |
| X67-B03 HC | |
| EVQLLESGGG LVQPGGSLRL SCAASGFTFS AYSMIWVRQA PGKGLEWVSY IRPSGGRTTY | 60 |
| ADSVKGRFTI SRDNSKNTLY LQMNSLRAED TAVYYCARGG LLLWSRELKS NYFDYWGQGT | 120 |
| LVTVSSASTK GPSVFPLAPS SKS | |
| X67-F10 LC | |
| QDIQMTQSPS SLSAFVGDRV TITCRASQPI DNYLNWYHQK PGKAPKLLIY AASRLQSGVP | 60 |
| SRLSGSGFGT DFTLTISSLQ PEDFGNYYCQ QSYTVPYTFG GGTKVEIR | 108 |
| X67-F10 HC | |
| EVQLLESGGG LVQPGGSLRL SCAASGFTFS AYSMIWVRQA PGKGLEWVSY IRPSGGRTTY | 60 |
| ADSVKGRFTI SRDNSKNTLY LQMNSLRAED TAVYYCARGG LLLWTRELKS NYFDYWGQGT | 120 |
| LVTVSSASTK GPSVFPLAPS SKS | 143 |
| X67-H01 LC | |
| QDIQMTQSPS SLSAFVGDRV TITCRASQPI DNYLNWYHQK PGKAPKLLIY AASRLQSGVP | 60 |
| SRLSGSGFGT DFTLTISSLQ PEDFGNYYCQ QSYTVPYTFG GGTKVEIR | 108 |
| X67-H01 HC | |
| EVQLLESGGG LVQPGGSLRL SCAASGFTFS AYSMIWVRQA PGKGLEWVSY IRPSGGRTTY | 60 |
| ADSVKGRFTI SRDNSKNTLY LQMNSLRAED TAVYYCARGG LLLWWRELKS NYFDYWGQGT | 120 |
| LVTVSSASTK GPSVFPLAPS SKS | 143 |
| X67-F08 LC | |
| QDIQMTQSPS SLSAFVGDRV TITCRASQPI DNYLNWYHQK PGKAPKLLIY AASRLQSGVP | 60 |
| SRLSGSGFGT DFTLTISSLQ PEDFGNYYCQ QSYTVPYTFG GGTKVEIR | 108 |
| X67-F08 HC | |
| EVQLLESGGG LVQPGGSLRL SCAASGFTFS AYSMIWVRQA PGKGLEWVSY IRPSGGRTTY | 60 |
| ADSVKGRFTI SRDNSKNTLY LQMNSLRAED TAVYYCARGG LLLWYRELKS NYFDYWGQGT | 120 |
| LVTVSSASTK GPSVFPLAPS SKS | 143 |

TABLE 6
CDR Amino Acid Sequences of Optimized Antibody Inhibitor of pKal Based on M142-H08

| | Ki, app | | | | | | |
|---|---|---|---|---|---|---|---|
| Initial | (nM) of | | | | | | |
| Name | IgG | LV-CDR1 | LV-CDR2 | LV-CDR3 | HV-CDR1 | HV-CDR2 | HV-CDR3^{a} |
| X67-D03 | 0.1 | RASQPIDNYLN | AASRLQS | QQSYTVPYT | AYSMI | YIRPSGGRTTYADSVKG | GGLLLWNRELKSNYFDY |
| X67-G04 | 0.35 | RASQPIDNYLN | AASRLQS | QQSYTVPYT | AYSMI | YIRPSGGRTTYADSVKG | GGLLLWARELKSNYFDY |

^{a}The F to N substitution (in bold) in the CDR3 of the M142-H08 gives X67-D03, an IgG that is not cleaved during expression and is a potent inhibitor of human. Similarly, the F to A substitition gives X67-G04, which is also not cleaved.

TABLE 7
CDR Amino Acid Sequences of Affinity Matured Antibody Inhibitors of pKal Discovered using ROLIC

| Initial | Ki, app | | | | | | |
|---|---|---|---|---|---|---|---|
| Name | (nM) | LV-CDR1 | LV-CDR2 | LV-CDR3 | HV-CDR1 | HV-CDR2 | HV-CDR3 |
| X59-C07 | 6.1 | RAGRSISTYVN | AASSLQS | QQSQSTPYT | HYLMT | YISPSGGHTIYADSVKG | VARGIAARSRTSYFDY |
| X60-D01 | 2.0 | RASQIVSSRYLA | GAASRAT | QQTYSSPFT | HYLMT | YISPSGGHTIYADSVKG | VARGIAARSRTSYFDY |
| X63-G10 | 9.0 | RASQSISNYLN | AASSLQS | QQSYTSPYT | HYLMT | YISPSGGHTIYADSVKG | VARGIAARSRTSYFDY |
| X64-F04 | 1.9 | RASQIVSSNYLA | GASNRAT | QQSFNIPYT | HYLMT | YISPSGGHTIYADSVKG | VARGIAARSRTSYFDY |
| X63-G06 | 0.4 (Fab) | RTSQFVNSNYLA | GASSRAT | QQSSRTPWT | HYLMT | YISPSGGHTIYADSVKG | VARGIAARSRTSYFDY |
| X81-B01^{a} | 0.2 (IgG) | RTSQFVNSNYLA | GASSRAT | QQSSRTPWT | HYLMT | YISPSGGHTIYADSVKG | VARGIAARSRTSYFDY |

^{a}X81-B01 is the codon optimized and germlined version of X63-G06 as a full length human IgG produced in HEK 293T cells.

[0941] Amino acid sequences of light chain (LC) and heavy chain (HC) variable domain of affinity matured antibody inhibitors of pKal discovered using ROLIC are shown below.

| X59-C07 LC | |
|---|---|
| QDIQMTQSPS SLSASVGDRV TVTCRAGRSI STYVNWYQQK PGKAPKLLIY AASSLQSGVP | 60 |
| SRFSGSRSGT DFTLTISSLQ PEDFATYYCQ QSQSTPYTFG QGTKLEVK | 108 |
| X59-C07 HC | |
| EVQLLESGGG LVQPGGSLRL SCAASGFTFS HYLMTWVRQA PGKGLEWVSY ISPSGGHTIY | 60 |
| ADSVKGRFTI SRDNSKNTLY LQMNSLRAED TAVYYCARVA RGIAARSRTS YFDYWGQGTL | 120 |
| VTVSSASTKG PSVFPLAPSS KS | 142 |
| X60-D01 LC | |
| QDIQMTQSPG TLSLSPGERA TLSCRASQIV SSRYLAWYQQ RPGQAPRLLI YGAASRATGI | 60 |
| PDRFSGSGSG TDFTLTISSL QAEDFATYYC QQTYSSPFTF GQGTKMEIK | 109 |
| X60-D01 HC | |
| EVQLLESGGG LVQPGGSLRL SCAASGFTFS HYLMTWVRQA PGKGLEWVSY ISPSGGHTIY | 60 |
| ADSVKGRFTI SRDNSKNTLY LQMNSLRAED TAVYYCARVA RGIAARSRTS YFDYWGQGTL | 120 |
| VTVSSASTKG PSVFPLAPSS KS | 142 |
| X63-G06 LC | |
| QDIQMTQSPG TLSLSPGERA TLSCRTSQFV NSNYLAWYQQ TPGQAPRLLI YGASSRATGI | 60 |
| PDRFSGTGYG TDFTLTISRL EPEDYGTYYC QQSSRTPWTF GQGTRVEIK | 109 |
| X63-G06 HC | |
| EVQLLESGGG LVQPGGSLRL SCAASGFTFS HYLMTWVRQA PGKGLEWVSY ISPSGGHTIY | 60 |
| ADSVKGRFTI SRDNSKNTLY LQMNSLRAED TAVYYCARVA RGIAARSRTS YFDYWGQGTL | 120 |
| VTVSSASTKG PSVFPLAPSS KS | 142 |
| X63-G10 LC | |
| QDIQMTQSPD SLSASVGDRV TITCRASQSI SNYLNWYQQK PGKAPKLLIY AASSLQSGVP | 60 |
| SRFSGSGSGT DFTLTISGLQ PEDFASYYCQ QSYTSPYTFV QGTKLEIKRT | 110 |
| X63-G10 HC | |
| EVQLLESGGG LVQPGGSLRL SCAASGFTFS HYLMTWVRQA PGKGLEWVSY ISPSGGHTIY | 60 |
| ADSVKGRFTI SRDNSKNTLY LQMNSLRAED TAVYYCARVA RGIAARSRTS YFDYWGQGTL | 120 |
| VTVSSASTKG PSVFPLAPSS KS | 142 |
| X64-F04 LC | |
| QDIQMTQSPA TLSLSPGERA TLSCRASQIV SSNYLAWYQQ KPGQAPRLLI YGASNRATGI | 60 |
| PDRFSGSGSG TEFTLTISSL QSEDFAIYYC QQSFNIPYTF GQGTRVDIK | 109 |
| X64-F04 HC | |
| EVQLLESGGG LVQPGGSLRL SCAASGFTFS HYLMTWVRQA PGKGLEWVSY ISPSGGHTIY | 60 |
| ADSVKGRFTI SRDNSKNTLY LQMNSLRAED TAVYYCARVA RGIAARSRTS YFDYWGQGTL | 120 |
| VTVSSASTKG PSVFPLAPSS KS | 142 |

X81-B01 is the germlined IgG produced in HEK 293T cells version of the X63-G06 Fab, as indicated above.
X101-A01 (aka DX-2922) is the germlined IgG produced in CHO cells version of the X63-G06 Fab

### Example 4: Affinity Maturation

[0942] In addition to optimizing the sequence of the clipped antibody (M142-H08), we also performed affinity maturation on two of the antibodies identified by phage display (M162-A04 and M160-G12). Both of these antibodies inhibit human pKal with single digit nanomolar potency, appear specific to pKal, and do not bind prekallikrein (Table 3). We first performed a novel form of light chain shuffling called ROLIC (Rapid Optimization of Light Chains) on M162-A04 and M160-G12 (see, e.g., WO 2009/102927 and U.S. 2009-0215119). From the screening of the antibodies discovered by ROLIC we identified one antibody with subnamolar potency (X63-G06) that shared the same heavy chain as M160-G12. We then constructed HV-CDR3 spiking affinity maturation libraries based on CDR3 sequences in M162-A04 and X63-G06 (described below).

[0943] Affinity Maturation by ROLIC. We used ROLIC to affinity mature the two leads from Table 3 that were not cleaved (M162-A04 and M160-G12). This process identified one antibody that inhibits pKal with a subnanomolar K_{i,app} (Table 7). X63-G06 inhibits pKal with a K_{i,app} of approximately 0.4 nM as a Fab fragment. When this antibody was converted to an IgG that is germlined and sequenced optimized for CHO cell expression (X81-B01) it was found to inhibit pKal with a K_{i,app} of approximately 0.2 nM.

### Example 5: Affinity Maturation of Heavy Chain CDR1/2 and CDR3

[0944] We used two additional affinity maturation strategies to identify highly potent antibodies based on two different parental antibody inhibitor leads: M162-A04 and X63-G06. One approach was to generate libraries that shuffled the CDR1/2 of the HC of two different parental antibody inhibitor leads (M162-A04 and X63-G06) against additional CDR1/2 diversity. Another approach was to create heavy chain CDR3 spiking libraries based on these leads.

[0945] The 82 antibodies that were discovered based on improvements in M162-A04 due to modifications in either the CDR1/2 and CDR3 region are shown in Table 8. Inhibition screening with 10 nM antibody (as Fab fragments) revealed that there were 33 antibodies that inhibited pKal activity by over 90%. Several antibodies were shown to be subnanomolar inhibitors of human pKal.

[0946] The 62 antibodies that were discovered based on improvements in X63-G06 due to modifications in either the CDR1/2 and CDR3 region are shown in Table 9. Inhibition screening with 10 nM antibody (as Fab fragments) revealed that there were 24 antibodies that inhibited pKal activity by over 90%. Several antibodies were shown to be subnanomolar inhibitors of human pKal.

TABLE 8
Sequences of Antibodies Obtained from CDR1/2 and CDR3 Spiking Affinity Maturation Libraries
Based on M162-A04

| | % | human | | | | | | |
|---|---|---|---|---|---|---|---|---|
| | inhib- | pKal | | | | | | |
| | ition | Ki, | | | | | | |
| Antibody | at | app | | | | | | |
| I.D. | 10 nM | (nM) | LV-CDR1 | LV-CDR2 | LV-CDR3 | HV-CDR1 | HV-CDR2 | HV-CDR3 |
| M202-A12 | 97.5 | 0.2 | RASQSISSWLA | KASTLES | QQYNTYWT | HYIMM | GIYSSGGITVYADSVKG | QRTGVPRRDSFNI |
| M196-C06 | 97.2 | 0.1 | RASQSISSWLA | KASTLES | QQYNTYWT | IYSMH | SIYPSRGMTWYADSVKG | RRTGIPRRDAFDI |
| M198-F09 | 96.9 | 0.2 | RASQSISSWLA | KASTLES | QQYNTYWT | VYNMH | SIYPSGGMTYYADSVKG | RRTGIPRRDAFDI |
| M199-A08 | 96.4 | 0.06 | RASQSISSWLA | KASTLES | QQYNTYWT | HYIMM | GIYSSGGITVYADSVKG | RRIGVPRRDEFDI |
| M202-C01 | 96.3 | 0.1 | RASQSISSWLA | KASTLES | QQYNTYWT | HYIMM | GIYSSGGITVYADSVKG | RRTGVPRWDDFDI |
| Ml98-A06 | 96.1 | 0.4 | RASQSISSWLA | KASTLES | QQYNTYWT | IYSMH | SIYSSGGPTKYADSVKG | RRTGIPRRDAFDI |
| M200-D03 | 95.9 | 0.1 | RASQSISSWLA | KASTLES | QQYNTYWT | HYIMM | GIYSSGGITVYADSVKG | RRIGVPRRDSFDM |
| M202-H03 | 95.7 | 0.1 | RASQSISSWLA | KASTLES | QQYNTYWT | HYIMM | GIYSSGGITVYADSVKG | RRTGVPRWDDFDI |
| M201-A07 | 95.7 | 0.1 | RASQSISSWLA | KASTLES | QQYNTYWT | HYIMM | GIYSSGGITVYADSVKG | RRTGVPRRDEFDI |
| M197-A01 | 95.3 | | RASQSISSWLA | KASTLES | QQYNTYWT | IYDMI | SIYPSGGNTSYADSVKG | RRTGIPRRDAFDI |
| M202-D09 | 95.0 | 0.4 | RASQSISSWLA | KASTLES | QQYNTYWT | HYIMM | GIYSSGGITVYADSVKG | RRIGVPRRDSFDI |
| M197-A09 | 94.9 | 0.6 | RASQSISSWLA | KASTLES | QQYNTYWT | VYNMH | SIYPSGGMTTYADSVKG | RRTGIPRRDAFDI |
| M198-G07 | 94.9 | | RASQSISSWLA | KASTLES | QQYNTYWT | IYDMT | SIYPSGGQTIYADSVKG | RRTGIPRRDAFDI |
| M200-A10 | 94.3 | 0.3 | RASQSISSWLA | KASTLES | QQYNTYWT | HYIMM | GIYSSGGITVYADSVKG | RRTGVPRRDSFDI |
| M197-H10 | 94.1 | | RASQSISSWLA | KASTLES | QQYNTYWT | SYNMH | SIVPSGGKTNYADSVKG | RRTGIPRRDAFDI |
| M196-D12 | 94.1 | 0.2 | RASQSISSWLA | KASTLES | QQYNTYWT | RYSMR | VIYPSGGQTYYADSVKG | RRTGIPRRDAFDI |
| M197-A08 | 93.7 | | RASQSISSWLA | KASTLES | QQYNTYWT | IYSMQ | SIGSSGGKTLYADSVKG | RRTGIPRRDAFDI |
| M198-B09 | 93.5 | | RASQSISSWLA | KASTLES | QQYNTYWT | VYSMT | SIGSSGGSTTYADSVKG | RRTGIPRRDAFDI |
| M198-E09 | 93.1 | | RASQSISSWLA | KASTLES | QQYNTYWT | IYDMN | SIYPSGGRTRYADSVKG | RRTGIPRRDAFDI |
| M202-B03 | 93.1 | 0.3 | RASQSISSWLA | KASTLES | QQYNTYWT | HYIMM | GIYSSGGITVYADSVKG | RRTGVPRRDDFDI |
| M198-C10 | 93.0 | | RASQSISSWLA | KASTLES | QQYNTYWT | HYMGMN | SIVPSGGWTQYADSVKG | RRTGIPRRDAFDI |
| M197-E12 | 93.0 | | RASQSISSWLA | KASTLES | QQYNTYWT | TYTMR | SIYPSGGKTQYADSVKG | RRTGIPRRDAFDI |
| M198-F04 | 92.9 | | RASQSISSWLA | KASTLES | QQYNTYWT | IYDMW | SIRPSGGITKYADSVKG | RRTGIPRRDAFDI |
| M197-H11 | 92.9 | | RASQSISSWLA | KASTLES | QQYNTYWT | IYNMI | SIYPSGGWTTYADSVKG | RRTGIPRRDAFDI |
| M197-F01 | 92.6 | | RASQSISSWLA | KASTLES | QQYNTYWT | IYHMY | SIGPSGGPTGYADSVKG | RRTGIPRRDAFDI |
| M198-E11 | 92.5 | | RASQSISSWLA | KASTLES | QQYNTYWT | TYSMY | SIYPSGGLTWYADSVKG | RRTGIPRRDAFDI |
| M202-C09 | 92.3 | 0.3 | RASQSISSWLA | KASTLES | QQYNTYWT | HYIMM | GIYSSGGITVYADSVKG | RRIGVPRRDDFDI |
| M198-H08 | 92.3 | | RASQSISSWLA | KASTLES | QQYNTYWT | IYDMY | SIGPSGGPTAYADSVKG | RRTGIPRRDAFDI |
| M198-F08 | 91.8 | | RASQSISSWLA | KASTLES | QQYNTYWT | VYSMW | SISSSGGMTEYADSVKG | RRTGIPRRDAFDI |
| M202-E06 | 91.5 | | RASQSISSWLA | KASTLES | QQYNTYWT | HYIMM | GIYSSGGITVYADSVKG | RRRGVPRRDDFDI |
| M195-D12 | 90.8 | | RASQSISSWLA | KASTLES | QQYNTYWT | IYGMF | GIGPSGGPTKYADSVKG | RRTGIPRRDAFDI |
| M197-F03 | 90.7 | | RASQSISSWLA | KASTLES | QQYNTYWT | IYSMF | SIGPSGGVTHYADSVKG | RRTGIPRRDAFDI |
| M198-E02 | 90.3 | | RASQSISSWLA | KASTLES | QQYNTYWT | IYSMY | YIRPSGGNTKYADSVKG | RRTGIPRRDAFDI |
| M198-A02 | 89.1 | | RASQSISSWLA | KASTLES | QQYNTYWT | RYSMI | SIWSSGGATEYADSVKG | RRTGIPRRDAFDI |
| M202-A01 | 88.9 | | RASQSISSWLA | KASTLES | QQYNTYWT | HYIMM | GIYSSGGITVYADSVKG | RRIGVPRRDAFDI |
| M202-G03 | 88.3 | | RASQSISSWLA | KASTLES | QQYNTYWT | HYIMM | GIYSSGGITVYADSVKG | RRTGVPRRDSFEI |
| M195-B12 | 87.7 | | RASQSISSWLA | KASTLES | QQYNTYWT | KYWMY | YIRPSGGQTYYADSVKG | RRTGIPRRDAFDI |
| M198-A07 | 86.1 | | RASQSISSWLA | KASTLES | QQYNTYWT | RYQMH | WISPSGGITGYADSVKG | RRTGIPRRDAFDI |
| M198-H02 | 85.8 | | RASQSISSWLA | KASTLES | QQYNTYWT | PYNMY | WIVPGGVTKYADSVKG | RRTGIPRRDAFDI |
| M200-H07 | 85.4 | | RASQSISSWLA | KASTLES | QQYNTYWT | HYIMM | GIYSSGGITVYADSVKG | RRTGVPRRNAFDN |
| M201-H06 | 84.6 | | RASQSISSWLA | KASTLES | QQYNTYWT | HYIMM | GIYSSGGITVYADSVKG | RRTGVPRRDAFDI |
| M202-F06 | 84.2 | | RASQSISSWLA | KASTLES | QQYNTYWT | HYIMM | GIYSSGGITVYADSVKG | RRTGVPRWDAFDI |
| M195-C12 | 84.2 | | RASQSISSWLA | KASTLES | QQYNTYWT | MYQMF | SISPGGGTQYADSVKG | RRTGIPRRDAFDI |
| M202-H05 | 84.0 | | RASQSISSWLA | KASTLES | QQYNTYWT | HYIMM | GIYSSGGITVYADSVKG | RRTGVPRRDVFDI |
| M198-C05 | 83.9 | | RASQSISSWLA | KASTLES | QQYNTYWT | RYKMY | VIGPSGGATFYADSVKG | RRTGIPRRDAFDI |
| M196-H03 | 83.9 | | RASQSISSWLA | KASTLES | QQYNTYWT | RYVMW | SISPSGDTHYADSVKG | RRTGIPRRDAFDI |
| M200-E11 | 83.2 | | RASQSISSWLA | KASTLES | QQYNTYWT | HYIMM | GIYSSGGITVYADSVKG | RRTGVPRRDAFDN |
| M202-B04 | 81.9 | | RASQSISSWLA | KASTLES | QQYNTYWT | HYIMM | GIYSSGGITVYADSVKG | RRSGVPRRDDFDI |
| M202-A04 | 81.2 | | RASQSISSWLA | KASTLES | QQYNTYWT | HYIMM | GIYSSGGITVYADSVKG | RRKGIPRRDDFDI |
| M198-B12 | 80.7 | | RASQSISSWLA | KASTLES | QQYNTYWT | KYSMA | GIYPSGGRTLYADSVKG | RRTGIPRRDAFDI |
| M198-A09 | 77.3 | | RASQSISSWLA | KASTLES | QQYNTYWT | IYFMS | SIRSSGGPTWYADSVKG | RRTGIPRRDAFDI |
| M198-C06 | 76.5 | | RASQSISSWLA | KASTLES | QQYNTYWT | QYFMH | YIYPSGGMTEYADSVKG | RRTGIPRRDAFDI |
| M198-C09 | 75.4 | | RASQSISSWLA | KASTLES | QQYNTYWT | IYTMY | SISPSGGWTYYADSVKG | RRTGIPRRDAFDI |
| M195-B02 | 75.1 | | RASQSISSWLA | KASTLES | QQYNTYWT | PYLMW | YIGPSGGPTHYADSVKG | RRTGIPRRDAFDI |
| M198-F12 | 74.6 | | RASQSISSWLA | KASTLES | QQYNTYWT | IYTMM | SIWSSGGQTKYADSVKG | RRTGIPRRDAFDI |
| M201-H08 | 74.5 | | RASQSISSWLA | KASTLES | QQYNTYWT | HYIMM | GIYSSGGITVYADSVKG | RRTGVPRRDALDN |
| M202-C02 | 74.3 | | RASQSISSWLA | KASTLES | QQYNTYWT | HYIMM | GIYSSGGITVYADSVKG | RRPGVPRRDAFDI |
| M198-C03 | 72.4 | | RASQSISSWLA | KASTLES | QQYNTYWT | RYSMS | GISPSGGETSYADSVKG | RRTGIPRRDAFDI |
| M198-A08 | 72.3 | | RASQSISSWLA | KASTLES | QQYNTYWT | WYMMQ | RISPSGGTTYADSVKG | RRTGIPRRDAFDI |
| M195-A02 | 71.3 | | RASQSISSWLA | KASTLES | QQYNTYWT | QYMMM | GISSSGGHTDYADSVKG | RRTGIPRRDAFDI |
| M197-G10 | 67.6 | | RASQSISSWLA | KASTLES | QQYNTYWT | VYAMR | SIYPSGGKTWYADSVKG | RRTGIPRRDAFDI |
| M195-G02 | 67.5 | | RASQSISSWLA | KASTLES | QQYNTYWT | PYNMM | SIWPSGGTTDYADSVKG | RRTGIPRRDAFDI |
| M196-D02 | 66.2 | | RASQSISSWLA | KASTLES | QQYNTYWT | VYSMH | VIGPSGGITLYADSVKG | RRTGIPRRDAFDI |
| M199-A11 | 65.4 | | RASQSISSWLA | KASTLES | QQYNTYWT | HYIMM | GIYSSGGITVYADSVKG | RRRGIPRRDAFDI |
| M200-F01 | 65.1 | | RASQSISSWLA | KASTLES | QQYNTYWT | HYIMM | GIYSSGGITVYADSVKG | RRMGIPRRNAFDI |
| M198-D12 | 63.5 | 0.7 | RASQSISSWLA | KASTLES | QQYNTYWT | LYVMY | YIVPSGGPTAYADSVKG | RRTGIPRRDAFDI |
| M197-C12 | 56.4 | | RASQSISSWLA | KASTLES | QQYNTYWT | PYDML | YIVSSGGLTKYADSVKG | RRTGIPRRDAFDI |
| M198-G03 | 53.8 | | RASQSISSWLA | KASTLES | QQYNTYWT | QYTMV | WIYSSRANYADSVKG | RRTGIPRRDAFDI |
| M199-B01 | 53.4 | | RASQSISSWLA | KASTLES | QQYNTYWT | HYIMM | GIYSSGGITVYADSVKG | RRTGIPRRDAFDN |
| M202-A08 | 52.9 | | RASQSISSWLA | KASTLES | QQYNTYWT | HYIMM | GIYSSGGITVYADSVKG | RRTGIPRWDAFDI |
| M195-A12 | 51.7 | | RASQSISSWLA | KASTLES | QQYNTYWT | PYMMM | GIYPSGGYTVYADSVKG | RRTGIPRRDAFDI |
| M202-E03 | 51.4 | | RASQSISSWLA | KASTLES | QQYNTYWT | HYIMM | GIYSSGGITVYADSVKG | RRTGIPRRDAFEI |
| M196-G12 | 51.1 | | RASQSISSWLA | KASTLES | QQYNTYWT | NYSMD | RIYSSGGGTIYADSVKG | RRTGIPRRDAFDI |
| M195-F12 | 45.5 | | RASQSISSWLA | KASTLES | QQYNTYWT | HYVMM | YIVPSGGVTAYADSVKG | RRTGIPRRDAFDI |
| M200-B01 | 42.6 | | RASQSISSWLA | KASTLES | QQYNTYWT | HYIMM | GIYSSGGITVYADSVKG | RRTGIPRRDAFDS |
| M198-H09 | 41.1 | | RASQSISSWLA | KASTLES | QQYNTYWT | IYLMI | YIGPSGGPTEYADSVKG | RRTGIPRRDAFDI |
| M195-E12 | 38.0 | | RASQSISSWLA | KASTLES | QQYNTYWT | YYIMF | YISPSGGYTHYADSVKG | RRTGIPRRDAFDI |
| M201-A06 | 36.8 | | RASQSISSWLA | KASTLES | QQYNTYWT | HYIMM | GIYSSGGITVYADSVKG | RRTGIPRRDVFDI |
| M202-A10 | 36.3 | | RASQSISSWLA | KASTLES | QQYNTYWT | HYIMM | GIYSSGGITVYADSVKG | RRTGIPRRDSFDI |
| M197-G11 | 19.2 | | RASQSISSWLA | KASTLES | QQYNTYWT | TYAMV | SIYPSGGITTYADSVKG | RRTGIPRRDAFDI |
| M201-F11 | 15.7 | | RASQSISSWLA | KASTLES | QQYNTYWT | HYIMM | GIYSSGGITVYADSVKG | RRSGIPRRDAFDI |
| M198-A01 | 13.8 | | RASQSISSWLA | KASTLES | QQYNTYWT | PYTMI | SISSSGGMTPYADSVKG | RRTGIPRRDAFDI |

[0947] Amino acid sequences of light chain (LC) and heavy chain (HC) variable domain of pKal antibodies obtained from CDR1/2 and CDR3 spiking affinity maturation libraries based on M162-A04.

| M195-A02 LC | |
|---|---|
| QDIQMTQSPS TLSASVGDRV TITCRASQSI SSWLAWYQQK PGKAPNLLIY KASTLESGVP | 60 |
| SRFSGSGSGT EFTLTISSLQ PDDFATYYCQ QYNTYWTFGQ GTKVEIK | 107 |
| M195-A02 HC | |
| EVQLLESGGG LVQPGGSLRL SCAASGFTFS QYMMMWVRQA PGKGLEWVSG ISSSGGHTDY | 60 |
| ADSVKGRFTI SRDNSKNTLY LQMNSLRAED TAVYYCAYRR TGIPRRDAFD IWGQGTMVTV | 120 |
| SSASTKGPSV FPLAPSSKS | 139 |
| M195-A12 LC | |
| QDIQMTQSPS TLSASVGDRV TITCRASQSI SSWLAWYQQK PGKAPNLLIY KASTLESGVP | 60 |
| SRFSGSGSGT EFTLTISSLQ PDDFATYYCQ QYNTYWTFGQ GTKVEIK | 107 |
| M195-A12 HC | |
| EVQLLESGGG LVQPGGSLRL SCAASGFTFS PYMMMWVRQA PGKGLEWVSG IYPSGGYTVY | 60 |
| ADSVKGRFTI SRDNSKNTLY LQMNSLRAED TAVYYCAYRR TGIPRRDAFD IWGQGTMVTV | 120 |
| SSASTKGPSV FPLAPSSKS | 139 |
| M195-B02 LC | |
| QDIQMTQSPS TLSASVGDRV TITCRASQSI SSWLAWYQQK PGKAPNLLIY KASTLESGVP | 60 |
| SRFSGSGSGT EFTLTISSLQ PDDFATYYCQ QYNTYWTFGQ GTKVEIK | 107 |
| M195-B02 HC | |
| EVQLLESGGG LVQPGGSLRL SCAASGFTFS PYLMWWVRQA PGKGLEWVSY IGPSGGPTHY | 60 |
| ADSVKGRFTI SRDNSKNTLY LQMNSLRAED TAVYYCAYRR TGIPRRDAFD IWGQGTMVTV | 120 |
| SSASTKGPSV FPLAPSSKS | 139 |
| M195-B12 LC | |
| QDIQMTQSPS TLSASVGDRV TITCRASQSI SSWLAWYQQK PGKAPNLLIY KASTLESGVP | 60 |
| SRFSGSGSGT EFTLTISSLQ PDDFATYYCQ QYNTYWTFGQ GTKVEIK | 107 |
| M195-B12 HC | |
| EVQLLESGGG LVQPGGSLRL SCAASGFTFS KYWMYWVRQA PGKGLEWVSY IRPSGGQTYY | 60 |
| ADSVKGRFTI SRDNSKNTLY LQMNSLRAED TAVYYCAYRR TGIPRRDAFD IWGQGTMVTV | 120 |
| SSASTKGPSV FPLAPSSKS | 139 |
| M195-C12 LC | |
| QDIQMTQSPS TLSASVGDRV TITCRASQSI SSWLAWYQQK PGKAPNLLIY KASTLESGVP | 60 |
| SRFSGSGSGT EFTLTISSLQ PDDFATYYCQ QYNTYWTFGQ GTKVEIK | 107 |
| M195-C12 HC | |
| EVQLLESGGG LVQPGGSLRL SCAASGFTFS MYQMFWVRQA PGKGLEWVSS ISPGGGTQYA | 60 |
| DSVKGRFTIS RDNSKNTLYL QMNSLRAEDT AVYYCAYRRT GIPRRDAFDI WGQGTMVTVS | 120 |
| SASTKGPSVF PLAPSSKS | 138 |
| M195-D12 LC | |
| QDIQMTQSPS TLSASVGDRV TITCRASQSI SSWLAWYQQK PGKAPNLLIY KASTLESGVP | 60 |
| SRFSGSGSGT EFTLTISSLQ PDDFATYYCQ QYNTYWTFGQ GTKVEIK | 107 |
| M195-D12 HC | |
| EVQLLESGGG LVQPGGSLRL SCAASGFTFS IYGMFWVRQA PGKGLEWVSG IGPSGGPTKY | 60 |
| ADSVKGRFTI SRDNSKNTLY LQMNSLRAED TAVYYCAYRR TGIPRRDAFD IWGQGTMVTV | 120 |
| SSASTKGPSV FPLAPSSKS | 139 |
| M195-E12 LC | |
| QDIQMTQSPS TLSASVGDRV TITCRASQSI SSWLAWYQQK PGKAPNLLIY KASTLESGVP | 60 |
| SRFSGSGSGT EFTLTISSLQ PDDFATYYCQ QYNTYWTFGQ GTKVEIK | 107 |
| M195-E12 HC | |
| EVQLLESGGG LVQPGGSLRL SCAASGFTFS YYIMFWVRQA PGKGLEWVSY ISPSGGYTHY | 60 |
| ADSVKGRFTI SRDNSKNTLY LQMNSLRAED TAVYYCAYRR TGIPRRDAFD IWGQGTMVTV | 120 |
| SSASTKGPSV FPLAPSSKS | 139 |
| M195-F12 LC | |
| QDIQMTQSPS TLSASVGDRV TITCRASQSI SSWLAWYQQK PGKAPNLLIY KASTLESGVP | 60 |
| SRFSGSGSGT EFTLTISSLQ PDDFATYYCQ QYNTYWTFGQ GTKVEIK | 107 |
| M195-F12 HC | |
| EVQLLESGGG LVQPGGSLRL SCAASGFTFS HYVMMWVRQA PGKGLEWVSY IVPSGGVTAY | 60 |
| ADSVKGRFTI SRDNSKNTLY LQMNSLRAED TAVYYCAYRR TGIPRRDAFD IWGQGTMVTV | 120 |
| SSASTKGPSV FPLAPSSKS | 139 |
| M195-G02 LC | |
| QDIQMTQSPS TLSASVGDRV TITCRASQSI SSWLAWYQQK PGKAPNLLIY KASTLESGVP | 60 |
| SRFSGSGSGT EFTLTISSLQ PDDFATYYCQ QYNTYWTFGQ GTKVEIK | 107 |
| M195-G02 HC | |
| EVQLLESGGG LVQPGGSLRL SCAASGFTFS PYNMMWVRQA PGKGLEWVSS IWPSGGTTDY | 60 |
| ADSVKGRFTI SRDNSKNTLY LQMNSLRAED TAVYYCAYRR TGIPRRDAFD IWGQGTMVTV | 120 |
| SSASTKGPSV FPLAPSSKS | 139 |
| M196-C06 LC | |
| QDIQMTQSPS TLSASVGDRV TITCRASQSI SSWLAWYQQK PGKAPNLLIY KASTLESGVP | 60 |
| SRFSGSGSGT EFTLTISSLQ PDDFATYYCQ QYNTYWTFGQ GTKVEIK | 107 |
| M196-C06 HC | |
| EVQLLESGGG LVQPGGSLRL SCAASGFTFS IYSMHWVRQA PGKGLEWVSS IYPSRGMTWY | 60 |
| ADSVKGRFTI SRDNSKNTLY LQMNSLRAED TAVYYCAYRR TGIPRRDAFD IWGQGTMVTV | 120 |
| SSASTKGPSV FPLAPSSKS | 139 |
| M196-D02 LC | |
| QDIQMTQSPS TLSASVGDRV TITCRASQSI SSWLAWYQQK PGKAPNLLIY KASTLESGVP | 60 |
| SRFSGSGSGT EFTLTISSLQ PDDFATYYCQ QYNTYWTFGQ GTKVEIK | 107 |
| M196-D02 HC | |
| EVQLLESGGG LVQPGGSLRL SCAASGFTFS VYSMHWVRQA PGKGLEWVSV IGPSGGITLY | 60 |
| ADSVKGRFTI SRDNSKNTLY LQMNSLRAED TAVYYCAYRR TGIPRRDAFD IWGQGTMVTV | 120 |
| SSASTKGPSV FPLAPSSKS | 139 |
| M196-D12 LC | |
| QDIQMTQSPS TLSASVGDRV TITCRASQSI SSWLAWYQQK PGKAPNLLIY KASTLESGVP | 60 |
| SRFSGSGSGT EFTLTISSLQ PDDFATYYCQ QYNTYWTFGQ GTKVEIK | 107 |
| M196-D12 HC | |
| EVQLLESGGG LVQPGGSLRL SCAASGFTFS RYSMRWVRQA PGKGLEWVSV IYPSGGQTYY | 60 |
| ADSVKGRFTI SRDNSKNTLY LQMNSLRAED TAVYYCAYRR TGIPRRDAFD IWGQGTMVTV | 120 |
| SSASTKGPSV FPLAPSSKS | 139 |
| M196-G12 LC | |
| QDIQMTQSPS TLSASVGDRV TITCRASQSI SSWLAWYQQK PGKAPNLLIY KASTLESGVP | 60 |
| SRFSGSGSGT EFTLTISSLQ PDDFATYYCQ QYNTYWTFGQ GTKVEIK | 107 |
| M196-G12 HC | |
| EVQLLESGGG LVQPGGSLRL SCAASGFTFS NYSMDWVRQA PGKGLEWVSR IYSSGGGTIY | 60 |
| ADSVKGRFTI SRDNSKNTLY LQMNSLRAED TAVYYCAYRR TGIPRRDAFD IWGQGTMVTV | 120 |
| SSASTKGPSV FPLAPSSKS | 139 |
| M196-H03 LC | |
| QDIQMTQSPS TLSASVGDRV TITCRASQSI SSWLAWYQQK PGKAPNLLIY KASTLESGVP | 60 |
| SRFSGSGSGT EFTLTISSLQ PDDFATYYCQ QYNTYWTFGQ GTKVEIK | 107 |
| M196-H03 HC | |
| EVQLLESGGG LVQPGGSLRL SCAASGFTFS RYVMWWVRQA PGKGLEWVSS ISPSGDTHYA | 60 |
| DSVKGRFTIS RDNSKNTLYL QMNSLRAEDT AVYYCAYRRT GIPRRDAFDI WGQGTMVTVS | 120 |
| SASTKGPSVF PLAPSSKS | 138 |
| M197-A01 LC | |
| QDIQMTQSPS TLSASVGDRV TITCRASQSI SSWLAWYQQK PGKAPNLLIY KASTLESGVP | 60 |
| SRFSGSGSGT EFTLTISSLQ PDDFATYYCQ QYNTYWTFGQ GTKVEIK | 107 |
| M197-A01 HC | |
| EVQLLESGGG LVQPGGSLRL SCAASGFTFS IYDMIWVRQA PGKGLEWVSS IYPSGGNTSY | 60 |
| ADSVKGRFTI SRDNSKNTLY LQMNSLRAED TAVYYCAYRR TGIPRRDAFD IWGQGTMVTV | 120 |
| SSASTKGPSV FPLAPSSKS | 139 |
| M197-A08 LC | |
| QDIQMTQSPS TLSASVGDRV TITCRASQSI SSWLAWYQQK PGKAPNLLIY KASTLESGVP | 60 |
| SRFSGSGSGT EFTLTISSLQ PDDFATYYCQ QYNTYWTFGQ GTKVEIK | 107 |
| M197-A08 HC | |
| EVQLLESGGG LVQPGGSLRL SCAASGFTFS IYSMQWVRQA PGKGLEWVSS IGSSGGKTLY | 60 |
| ADSVKGRFTI SRDNSKNTLY LQMNSLRAED TAVYYCAYRR TGIPRRDAFD IWGQGTMVTV | 120 |
| SSASTKGPSV FPLAPSSKS | 139 |
| M197-A09 LC | |
| QDIQMTQSPS TLSASVGDRV TITCRASQSI SSWLAWYQQK PGKAPNLLIY KASTLESGVP | 60 |
| SRFSGSGSGT EFTLTISSLQ PDDFATYYCQ QYNTYWTFGQ GTKVEIK | 107 |
| M197-A09 HC | |
| EVQLLESGGG LVQPGGSLRL SCAASGFTFS VYNMHWVRQA PGKGLEWVSS IYPSGGMTTY | 60 |
| ADSVKGRFTI SRDNSKNTLY LQMNSLRAED TAVYYCAYRR TGIPRRDAFD IWGQGTMVTV | 120 |
| SSASTKGPSV FPLAPSSKS | 139 |
| M197-C12 LC | |
| QDIQMTQSPS TLSASVGDRV TITCRASQSI SSWLAWYQQK PGKAPNLLIY KASTLESGVP | 60 |
| SRFSGSGSGT EFTLTISSLQ PDDFATYYCQ QYNTYWTFGQ GTKVEIK | 107 |
| M197-C12 HC | |
| EVQLLESGGG LVQPGGSLRL SCAASGFTFS PYDMLWVRQA PGKGLEWVSY IVSSGGLTKY | 60 |
| ADSVKGRFTI SRDNSKNTLY LQMNSLRAED TAVYYCAYRR TGIPRRDAFD IWGQGTMVTV | 120 |
| SSASTKGPSV FPLAPSSKS | 139 |
| M197-E12 LC | |
| QDIQMTQSPS TLSASVGDRV TITCRASQSI SSWLAWYQQK PGKAPNLLIY KASTLESGVP | 60 |
| SRFSGSGSGT EFTLTISSLQ PDDFATYYCQ QYNTYWTFGQ GTKVEIK | 107 |
| M197-E12 HC | |
| EVQLLESGGG LVQPGGSLRL SCAASGFTFS TYTMRWVRQA PGKGLEWVSS IYPSGGKTQY | 60 |
| ADSVKGRFTI SRDNSKNTLY LQMNSLRAED TAVYYCAYRR TGIPRRDAFD IWGQGTMVTV | 120 |
| SSASTKGPSV FPLAPSSKS | 139 |
| M197-F01 LC | |
| QDIQMTQSPS TLSASVGDRV TITCRASQSI SSWLAWYQQK PGKAPNLLIY KASTLESGVP | 60 |
| SRFSGSGSGT EFTLTISSLQ PDDFATYYCQ QYNTYWTFGQ GTKVEIK | 107 |
| M197-F01 HC | |
| EVQLLESGGG LVQPGGSLRL SCAASGFTFS IYHMYWVRQA PGKGLEWVSS IGPSGGPTGY | 60 |
| ADSVKGRFTI SRDNSKNTLY LQMNSLRAED TAVYYCAYRR TGIPRRDAFD IWGQGTMVTV | 120 |
| SSASTKGPSV FPLAPSSKS | 139 |
| M197-F03 LC | |
| QDIQMTQSPS TLSASVGDRV TITCRASQSI SSWLAWYQQK PGKAPNLLIY KASTLESGVP | 60 |
| SRFSGSGSGT EFTLTISSLQ PDDFATYYCQ QYNTYWTFGQ GTKVEIK | 107 |
| M197-F03 HC | |
| EVQLLESGGG LVQPGGSLRL SCAASGFTFS IYSMFWVRQA PGKGLEWVSS IGPSGGVTHY | 60 |
| ADSVKGRFTI SRDNSKNTLY LQMNSLRAED TAVYYCAYRR TGIPRRDAFD IWGQGTMVTV | 120 |
| SSASTKGPSV FPLAPSSKS | 139 |
| M197-G10 LC | |
| QDIQMTQSPS TLSASVGDRV TITCRASQSI SSWLAWYQQK PGKAPNLLIY KASTLESGVP | 60 |
| SRFSGSGSGT EFTLTISSLQ PDDFATYYCQ QYNTYWTFGQ GTKVEIK | 107 |
| M197-G10 HC | |
| EVQLLESGGG LVQPGGSLRL SCAASGFTFS VYAMRWVRQA PGKGLEWVSS IYPSGGKTWY | 60 |
| ADSVKGRFTI SRDNSKNTLY TLQMNSLRAE DAVYYCAYRR TGIPRRDAFD IWGQGTMVTV | 120 |
| SSASTKGPSV FPLAPSSKS | 139 |
| M197-G11 LC | |
| QDIQMTQSPS TLSASVGDRV TITCRASQSI SSWLAWYQQK PGKAPNLLIY KASTLESGVP | 60 |
| SRFSGSGSGT EFTLTISSLQ PDDFATYYCQ QYNTYWTFGQ GTKVEIK | 107 |
| M197-G11 HC | |
| EVQLLESGGG LVQPGGSLRL SCAASGFTFS TYAMVWVRQA PGKGLEWVSS IYPSGGITTY | 60 |
| ADSVKGRFTI SRDNSKNTLY LQMNSLRAED TAVYYCAYRR TGIPRRDAFD IWGQGTMVTV | 120 |
| SSASTKGPSV FPLAPSSKS | 139 |
| M197-H10 LC | |
| QDIQMTQSPS TLSASVGDRV TITCRASQSI SSWLAWYQQK PGKAPNLLIY KASTLESGVP | 60 |
| SRFSGSGSGT EFTLTISSLQ PDDFATYYCQ QYNTYWTFGQ GTKVEIK | 107 |
| M197-H10 HC | |
| EVQLLESGGG LVQPGGSLRL SCAASGFTFS SYNMHWVRQA PGKGLEWVSS IVPSGGKTNY | 60 |
| ADSVKGRFTI SRDNSKNTLY LQMNSLRAED TAVYYCAYRR TGIPRRDAFD IWGQGTMVTV | 120 |
| SSASTKGPSV FPLAPSSKS | 139 |
| M197-H11 LC | |
| QDIQMTQSPS TLSASVGDRV TITCRASQSI SSWLAWYQQK PGKAPNLLIY KASTLESGVP | 60 |
| SRFSGSGSGT EFTLTISSLQ PDDFATYYCQ QYNTYWTFGQ GTKVEIK | 107 |
| M197-H11 HC | |
| EVQLLESGGG LVQPGGSLRL SCAASGFTFS IYNMIWVRQA PGKGLEWVSS IYPSGGWTTY | 60 |
| ADSVKGRFTI SRDNSKNTLY LQMNSLRAED TAVYYCAYRR TGIPRRDAFD IWGQGTMVTV | 120 |
| SSASTKGPSV FPLAPSSKS | 139 |
| M198-A01 LC | |
| QDIQMTQSPS TLSASVGDRV TITCRASQSI SSWLAWYQQK PGKAPNLLIY KASTLESGVP | 60 |
| SRFSGSGSGT EFTLTISSLQ PDDFATYYCQ QYNTYWTFGQ GTKVEIK | 107 |
| M198-A01 HC | |
| EVQLLESGGG LVQPGGSLRL SCAASGFTFS PYTMIWVRQA PGKGLEWVSS ISSSGGMTPY | 60 |
| ADSVKGRFTI SRDNSKNTLY LQMNSLRAED TAVYYCAYRR TGIPRRDAFD IWGQGTMVTV | 120 |
| SSASTKGPSV FPLAPSSKS | 139 |
| M198-A02 LC | |
| QDIQMTQSPS TLSASVGDRV TITCRASQSI SSWLAWYQQK PGKAPNLLIY KASTLESGVP | 60 |
| SRFSGSGSGT EFTLTISSLQ PDDFATYYCQ QYNTYWTFGQ GTKVEIK | 107 |
| M198-A02 HC | |
| EVQLLESGGG LVQPGGSLRL SCAASGFTFS RYSMIWVRQA PGKGLEWVSS IWSSGGATEY | 60 |
| ADSVKGRFTI SRDNSKNTLY LQMNSLRAED TAVYYCAYRR TGIPRRDAFD IWGQGTMVTV | 120 |
| SSASTKGPSV PLAPSSKS | 139 |
| M198-A06 LC | |
| QDIQMTQSPS TLSASVGDRV TITCRASQSI SSWLAWYQQK PGKAPNLLIY KASTLESGVP | 60 |
| SRFSGSGSGT EFTLTISSLQ PDDFATYYCQ QYNTYWTFGQ GTKVEIK | 107 |
| M198-A06 HC | |
| EVQLLESGGG LVQPGGSLRL SCAASGFTFS IYSMHWVRQA PGKGLEWVSS IYSSGGPTKY | 60 |
| ADSVKGRFTI SRDNSKNTLY LQMNSLRAED TAVYYCAYRR TGIPRRDAFD IWGQGTMVTV | 120 |
| SSASTKGPSV FPLAPSSKS | 139 |
| M198-A07 LC | |
| QDIQMTQSPS TLSASVGDRV TITCRASQSI SSWLAWYQQK PGKAPNLLIY KASTLESGVP | 60 |
| SRFSGSGSGT EFTLTISSLQ PDDFATYYCQ QYNTYWTFGQ GTKVEIK | 107 |
| M198-A07 HC | |
| EVQLLESGGG LVQPGGSLRL SCAASGFTFS RYQMHWVRQA PGKGLEWVSW ISPSGGITGY | 60 |
| ADSVKGRFTI SRDNSKNTLY LQMNSLRAEDT AVYYCAYRR TGIPRRDAFD IWGQGTMVTV | 120 |
| SSASTKGPSV FPLAPSSKS | 139 |
| M198-A08 LC | |
| QDIQMTQSPS TLSASVGDRV TITCRASQSI SSWLAWYQQK PGKAPNLLIY KASTLESGVP | 60 |
| SRFSGSGSGT EFTLTISSLQ PDDFATYYCQ QYNTYWTFGQ GTKVEIK | 107 |
| M198-A08 HC | |
| EVQLLESGGG LVQPGGSLRL SCAASGFTFS WYMMQWVRQA PGKGLEWVSR ISPSGGTTYA | 60 |
| DSVKGRFTIS RDNSKNTLYL QMNSLRAEDT AVYYCAYRRT GIPRRDAFDI WGQGTMVTVS | 120 |
| SASTKGPSVF PLAPSSKS | 138 |
| M198-A09 LC | |
| QDIQMTQSPS TLSASVGDRV TITCRASQSI SSWLAWYQQK PGKAPNLLIY KASTLESGVP | 60 |
| SRFSGSGSGT EFTLTISSLQ PDDFATYYCQ QYNTYWTFGQ GTKVEIK | 107 |
| M198-A09 HC | |
| EVQLLESGGG LVQPGGSLRL SCAASGFTFS IYFMSWVRQA PGKGLEWVSS IRSSGGPTWY | 60 |
| ADSVKGRFTI SRDNSKNTLY LQMNSLRAED TAVYYCAYRR TGIPRRDAFD IWGQGTMVTV | 120 |
| SSASTKGPSV FPLAPSSKS | 139 |
| M198-B09 LC | |
| QDIQMTQSPS TLSASVGDRV TITCRASQSI SSWLAWYQQK PGKAPNLLIY KASTLESGVP | 60 |
| SRFSGSGSGT EFTLTISSLQ PDDFATYYCQ QYNTYWTFGQ GTKVEIK | 107 |
| M198-B09 HC | |
| EVQLLESGGG LVQPGGSLRL SCAASGFTFS VYSMTWVRQA PGKGLEWVSS IGSSGGSTTY | 60 |
| ADSVKGRFTI SRDNSKNTLY LQMNSLRAED TAVYYCAYRR TGIPRRDAFD IWGQGTMVTV | 120 |
| SSASTKGPSV FPLAPSSKS | 139 |
| M198-B12 LC | |
| QDIQMTQSPS TLSASVGDRV TITCRASQSI SSWLAWYQQK PGKAPNLLIY KASTLESGVP | 60 |
| SRFSGSGSGT EFTLTISSLQ PDDFATYYCQ QYNTYWTFGQ GTKVEIK | 107 |
| M198-B12 HC | |
| EVQLLESGGG LVQPGGSLRL SCAASGFTFS KYSMAWVRQA PGKGLEWVSG IYPSGGRTLY | 60 |
| ADSVKGRFTI SRDNSKNTLY LQMNSLRAED TAVYYCAYRR TGIPRRDAFD IWGQGTMVTV | 120 |
| SSASTKGPSV FPLAPSSKS | 139 |
| M198-C03 LC | |
| QDIQMTQSPS TLSASVGDRV TITCRASQSI SSWLAWYQQK PGKAPNLLIY KASTLESGVP | 60 |
| SRFSGSGSGT EFTLTISSLQ PDDFATYYCQ QYNTYWTFGQ GTKVEIK | 107 |
| M198-C03 HC | |
| EVQLLESGGG LVQPGGSLRL SCAASGFTFS RYSMSWVRQA PGKGLEWVSG ISPSGGETSY | 60 |
| ADSVKGRFTI SRDNSKNTLY LQMNSLRAED TAVYYCAYRR TGIPRRDAFD IWGQGTMVTV | 120 |
| SSASTKGPSV FPLAPSSKS | 139 |
| M198-C05 LC | |
| QDIQMTQSPS TLSASVGDRV TITCRASQSI SSWLAWYQQK PGKAPNLLIY KASTLESGVP | 60 |
| SRFSGSGSGT EFTLTISSLQ PDDFATYYCQ QYNTYWTFGQ GTKVEIK | 107 |
| M198-C05 HC | |
| EVQLLESGGG LVQPGGSLRL SCAASGFTFS RYKMYWVRQA PGKGLEWVSV IGPSGGATFY | 60 |
| ADSVKGRFTI SRDNSKNTLY LQMNSLRAED TAVYYCAYRR TGIPRRDAFD IWGQGTMVTV | 120 |
| SSASTKGPSV FPLAPSSKS | 139 |
| M198-C06 LC | |
| QDIQMTQSPS TLSASVGDRV TITCRASQSI SSWLAWYQQK PGKAPNLLIY KASTLESGVP | 60 |
| SRFSGSGSGT EFTLTISSLQ PDDFATYYCQ QYNTYWTFGQ GTKVEIK | 107 |
| M198-C06 HC | |
| EVQLLESGGG LVQPGGSLRL SCAASGFTFS QYFMHWVRQA PGKGLEWVSY IYPSGGMTEY | 60 |
| ADSVKGRFTI SRDNSKNTLY LQMNSLRAED TAVYYCAYRR TGIPRRDAFD IWGQGTMVTV | 120 |
| SSASTKGPSV FPLAPSSKS | 139 |
| M198-C09 LC | |
| QDIQMTQSPS TLSASVGDRV TITCRASQSI SSWLAWYQQK PGKAPNLLIY KASTLESGVP | 60 |
| SRFSGSGSGT EFTLTISSLQ PDDFATYYCQ QYNTYWTFGQ GTKVEIK | 107 |
| M198-C09 HC | |
| EVQLLESGGG LVQPGGSLRL SCAASGFTFS IYTMYWVRQA PGKGLEWVSS ISPSGGWTYY | 60 |
| ADSVKGRFTI SRDNSKNTLY LQMNSLRAED TAVYYCAYRR TGIPRRDAFD IWGQGTMVTV | 120 |
| SSASTKGPSV FPLAPSSKS | 139 |
| M198-C10 LC | |
| QDIQMTQSPS TLSASVGDRV TITCRASQSI SSWLAWYQQK PGKAPNLLIY KASTLESGVP | 60 |
| SRFSGSGSGT EFTLTISSLQ PDDFATYYCQ QYNTYWTFGQ GTKVEIK | 107 |
| M198-C10 HC | |
| EVQLLESGGG LVQPGGSLRL SCAASGFTFS HYMGMNWVRQ APGKGLEWVS SIVPSGGWTQ | 60 |
| YADSVKGRFT ISRDNSKNTL YLQMNSLRAE DTAVYYCAYR RTGIPRRDAF DIWGQGTMVT | 120 |
| VSSASTKGPS VFPLAPSSKS | 140 |
| M198-D12 LC | |
| QDIQMTQSPS TLSASVGDRV TITCRASQSI SSWLAWYQQK PGKAPNLLIY KASTLESGVP | 60 |
| SRFSGSGSGT EFTLTISSLQ PDDFATYYCQ QYNTYWTFGQ GTKVEIK | 107 |
| M198-D12 HC | |
| EVQLLESGGG LVQPGGSLRL SCAASGFTFS LYVMYWVRQA PGKGLEWVSY IVPSGGPTAY | 60 |
| ADSVKGRFTI SRDNSKNTLY LQMNSLRAED TAVYYCAYRR TGIPRRDAFD IWGQGTMVTV | 120 |
| SSASTKGPSV FPLAPSSKS | 139 |
| M198-E02 LC | |
| QDIQMTQSPS TLSASVGDRV TITCRASQSI SSWLAWYQQK PGKAPNLLIY KASTLESGVP | 60 |
| SRFSGSGSGT EFTLTISSLQ PDDFATYYCQ QYNTYWTFGQ GTKVEIK | 107 |
| M198-E02 HC | |
| EVQLLESGGG LVQPGGSLRL SCAASGFTFS IYSMYWVRQA PGKGLEWVSY IRPSGGNTKY | 60 |
| ADSVKGRFTI SRDNSKNTLY LQMNSLRAED TAVYYCAYRR TGIPRRDAFD IWGQGTMVTV | 120 |
| SSASTKGPSV FPLAPSSKS | 139 |
| M198-E09 LC | |
| QDIQMTQSPS TLSASVGDRV TITCRASQSI SSWLAWYQQK PGKAPNLLIY KASTLESGVP | 60 |
| SRFSGSGSGT EFTLTISSLQ PDDFATYYCQ QYNTYWTFGQ GTKVEIK | 107 |
| M198-E09 HC | |
| EVQLLESGGG LVQPGGSLRL SCAASGFTFS IYDMNWVRQA PGKGLEWVSS IYPSGGRTRY | 60 |
| ADSVKGRFTI SRDNSKNTLY LQMNSLRAED TAVYYCAYRR TGIPRRDAFD IWGQGTMVTV | 120 |
| SSASTKGPSV FPLAPSSKS | 139 |
| M198-E11 LC | |
| QDIQMTQSPS TLSASVGDRV TITCRASQSI SSWLAWYQQK PGKAPNLLIY KASTLESGVP | 60 |
| SRFSGSGSGT EFTLTISSLQ PDDFATYYCQ QYNTYWTFGQ GTKVEIK | 107 |
| M198-E11 HC | |
| EVQLLESGGG LVQPGGSLRL SCAASGFTFS TYSMYWVRQA PGKGLEWVSS IYPSGGLTWY | 60 |
| ADSVKGRFTI SRDNSKNTLY LQMNSLRAED TAVYYCAYRR TGIPRRDAFD IWGQGTMVTV | 120 |
| SSASTKGPSV FPLAPSSKS | 139 |
| M198-F04 LC | |
| QDIQMTQSPS TLSASVGDRV TITCRASQSI SSWLAWYQQK PGKAPNLLIY KASTLESGVP | 60 |
| SRFSGSGSGT EFTLTISSLQ PDDFATYYCQ QYNTYWTFGQ GTKVEIK | 107 |
| M198-F04 HC | |
| EVQLLESGGG LVQPGGSLRL SCAASGFTFS IYDMWWVRQA PGKGLEWVSS IRPSGGITKY | 60 |
| ADSVKGRFTI SRDNSKNTLY LQMNSLRAED TAVYYCAYRR TGIPRRDAFD IWGQGTMVTV | 120 |
| SSASTKGPSV FPLAPSSKS | 139 |
| M198-F08 LC | |
| QDIQMTQSPS TLSASVGDRV TITCRASQSI SSWLAWYQQK PGKAPNLLIY KASTLESGVP | 60 |
| SRFSGSGSGT EFTLTISSLQ PDDFATYYCQ QYNTYWTFGQ GTKVEIK | 107 |
| M198-F08 HC | |
| EVQLLESGGG LVQPGGSLRL SCAASGFTFS VYSMWWVRQA PGKGLEWVSS ISSSGGMTEY | 60 |
| ADSVKGRFTI SRDNSKNTLY LQMNSLRAED TAVYYCAYRR TGIPRRDAFD IWGQGTMVTV | 120 |
| SSASTKGPSV FPLAPSSKS | 139 |
| M198-F09 LC | |
| QDIQMTQSPS TLSASVGDRV TITCRASQSI SSWLAWYQQK PGKAPNLLIY KASTLESGVP | 60 |
| SRFSGSGSGT EFTLTISSLQ PDDFATYYCQ QYNTYWTFGQ GTKVEIK | 107 |
| M198-F09 HC | |
| EVQLLESGGG LVQPGGSLRL SCAASGFTFS VYNMHWVRQA PGKGLEWVSS IYPSGGMTYY | 60 |
| ADSVKGRFTI SRDNSKNTLY LQMNSLRAED TAVYYCAYRR TGIPRRDAFD IWGQGTMVTV | 120 |
| SSASTKGPSV FPLAPSSKS | 139 |
| M198-F12 LC | |
| QDIQMTQSPS TLSASVGDRV TITCRASQSI SSWLAWYQQK PGKAPNLLIY KASTLESGVP | 60 |
| SRFSGSGSGT EFTLTISSLQ PDDFATYYCQ QYNTYWTFGQ GTKVEIK | 107 |
| M198-F12 HC | |
| EVQLLESGGG LVQPGGSLRL SCAASGFTFS IYTMMWVRQA PGKGLEWVSS IWSSGGQTKY | 60 |
| ADSVKGRFTI SRDNSKNTLY LQMNSLRAED TAVYYCAYRR TGIPRRDAFD IWGQGTMVTV | 120 |
| SSASTKGPSV FPLAPSSKS | 139 |
| M198-G03 LC | |
| QDIQMTQSPS TLSASVGDRV TITCRASQSI SSWLAWYQQK PGKAPNLLIY KASTLESGVP | 60 |
| SRFSGSGSGT EFTLTISSLQ PDDFATYYCQ QYNTYWTFGQ GTKVEIK | 107 |
| M198-G03 HC | |
| EVQLLESGGG LVQPGGSLRL SCAASGFTFS QYTMVWVRQA PGKGLEWVSW IYSSRANYAD | 60 |
| SVKGRFTISR DNSKNTLYLQ MNSLRAEDTA VYYCAYRRTG IPRRDAFDIW GQGTMVTVSS | 120 |
| ASTKGPSVFP LAPSSKS | 137 |
| M198-G07 LC | |
| QDIQMTQSPS TLSASVGDRV TITCRASQSI SSWLAWYQQK PGKAPNLLIY KASTLESGVP | 60 |
| SRFSGSGSGT EFTLTISSLQ PDDFATYYCQ QYNTYWTFGQ GTKVEIK | 107 |
| M198-G07 HC | |
| EVQLLESGGG LVQPGGSLRL SCAASGFTFS IYDMTWVRQA PGKGLEWVSS IYPSGGQTIY | 60 |
| ADSVKGRFTI SRDNSKNTLY LQMNSLRAED TAVYYCAYRR TGIPRRDAFD IWGQGTMVTV | 120 |
| SSASTKGPSV FPLAPSSKS | 139 |
| M198-H02 LC | |
| QDIQMTQSPS TLSASVGDRV TITCRASQSI SSWLAWYQQK PGKAPNLLIY KASTLESGVP | 60 |
| SRFSGSGSGT EFTLTISSLQ PDDFATYYCQ QYNTYWTFGQ GTKVEIK | 107 |
| M198-H02 HC | |
| EVQLLESGGG LVQPGGSLRL SCAASGFTFS PYNMYWVRQA PGKGLEWVSW IVPGGVTKYA | 60 |
| DSVKGRFTIS RDNSKNTLYL QMNSLRAEDT AVYYCAYRRT GIPRRDAFDI WGQGTMVTVS | 120 |
| SASTKGPSVF LAPSSKS | 138 |
| M198-H08 LC | |
| QDIQMTQSPS TLSASVGDRV TITCRASQSI SSWLAWYQQK PGKAPNLLIY KASTLESGVP | 60 |
| SRFSGSGSGT EFTLTISSLQ PDDFATYYCQ QYNTYWTFGQ GTKVEIK | 107 |
| M198-H08 HC | |
| EVQLLESGGG LVQPGGSLRL SCAASGFTFS IYDMYWVRQA PGKGLEWVSS IGPSGGPTAY | 60 |
| ADSVKGRFTI SRDNSKNTLY LQMNSLRAED TAVYYCAYRR TGIPRRDAFD IWGQGTMVTV | 120 |
| SSASTKGPSV FPLAPSSKS | 139 |
| M198-H09 LC | |
| QDIQMTQSPS TLSASVGDRV TITCRASQSI SSWLAWYQQK PGKAPNLLIY KASTLESGVP | 60 |
| SRFSGSGSGT EFTLTISSLQ PDDFATYYCQ QYNTYWTFGQ GTKVEIK | 107 |
| M198-H09 HC | |
| EVQLLESGGG LVQPGGSLRL SCAASGFTFS IYLMIWVRQA PGKGLEWVSY IGPSGGPTEY | 60 |
| ADSVKGRFTI SRDNSKNTLY LQMNSLRAED TAVYYCAYRR TGIPRRDAFD IWGQGTMVTV | 120 |
| SSASTKGPSV FPLAPSSKS | 139 |
| M199-A08 LC | |
| QDIQMTQSPS TLSASVGDRV TITCRASQSI SSWLAWYQQK PGKAPNLLIY KASTLESGVP | 60 |
| SRFSGSGSGT EFTLTISSLQ PDDFATYYCQ QYNTYWTFGQ GTKVEIK | 107 |
| M199-A08 HC | |
| EVQLLESGGG LVQPGGSLRL SCAASGFTFS HYIMMWVRQA PGKGLEWVSG IYSSGGITVY | 60 |
| ADSVKGRFTI SRDNSKNTLY LQMNSLRAED TAVYYCAYRR IGVPRRDEFD IWGQGTMVTV | 120 |
| SSASTKGPSV FPLAPSSKS | 139 |
| M199-A11 LC | |
| QDIQMTQSPS TLSASVGDRV TITCRASQSI SSWLAWYQQK PGKAPNLLIY KASTLESGVP | 60 |
| SRFSGSGSGT EFTLTISSLQ PDDFATYYCQ QYNTYWTFGQ GTKVEIK | 107 |
| M199-A11 HC | |
| EVQLLESGGG LVQPGGSLRL SCAASGFTFS HYIMMWVRQA PGKGLEWVSG IYSSGGITVY | 60 |
| ADSVKGRFTI SRDNSKNTLY LQMNSLRAED TAVYYCAYRR RGIPRRDAFD IWGQGTMVTV | 120 |
| SSASTKGPSV FPLAPSSKS | 139 |
| M199-B01 LC | |
| QDIQMTQSPS TLSASVGDRV TITCRASQSI SSWLAWYQQK PGKAPNLLIY KASTLESGVP | 60 |
| SRFSGSGSGT EFTLTISSLQ PDDFATYYCQ QYNTYWTFGQ GTKVEIK | 107 |
| M199-B01 HC | |
| EVQLLESGGG LVQPGGSLRL SCAASGFTFS HYIMMWVRQA PGKGLEWVSG IYSSGGITVY | 60 |
| ADSVKGRFTI SRDNSKNTLY LQMNSLRAED TAVYYCAFRR TGIPRRDAFD NWGQGTMVTV | 120 |
| SSASTKGPSV FPLAPSSKS | 139 |
| M200-A10 LC | |
| QDIQMTQSPS TLSASVGDRV TITCRASQSI SSWLAWYQQK PGKAPNLLIY KASTLESGVP | 60 |
| SRFSGSGSGT EFTLTISSLQ PDDFATYYCQ QYNTYWTFGQ GTKVEIK | 107 |
| M200-A10 HC | |
| EVQLLESGGG LVQPGGSLRL SCAASGFTFS HYIMMWVRQA PGKGLEWVSG IYSSGGITVY | 60 |
| ADSVKGRFTI SRDNSKNTLY LQMNSLRAED TAVYYCAYRR TGVPRRDSFD IWGQGTMVTV | 120 |
| SSASTKGPSV FPLAPSSKS | 139 |
| M200-B01 LC | |
| QDIQMTQSPS TLSASVGDRV TITCRASQSI SSWLAWYQQK PGKAPNLLIY KASTLESGVP | 60 |
| SRFSGSGSGT EFTLTISSLQ PDDFATYYCQ QYNTYWTFGQ GTKVEIK | 107 |
| M200-B01 HC | |
| EVQLLESGGG LVQPGGSLRL SCAASGFTFS HYIMMWVRQA PGKGLEWVSG IYSSGGITVY | 60 |
| ADSVKGRFTI SRDNSKNTLY LQMNSLRAED TAVYYCAYRR TGIPRRDAFD SWGQGTMVTV | 120 |
| SSASTKGPSV FPLAPSSKS | 139 |
| M200-D03 LC | |
| QDIQMTQSPS TLSASVGDRV TITCRASQSI SSWLAWYQQK PGKAPNLLIY KASTLESGVP | 60 |
| SRFSGSGSGT EFTLTISSLQ PDDFATYYCQ QYNTYWTFGQ GTKVEIK | 107 |
| M200-D03 HC | |
| EVQLLESGGG LVQPGGSLRL SCAASGFTFS HYIMMWVRQA PGKGLEWVSG IYSSGGITVY | 60 |
| ADSVKGRFTI SRDNSKNTLY LQMNSLRAED TAVYYCAWRR IGVPRRDSFD MWGQGTMVTV | 120 |
| SSASTKGPSV FPLAPSSKS | 139 |
| M200-E11 LC | |
| QDIQMTQSPS TLSASVGDRV TITCRASQSI SSWLAWYQQK PGKAPNLLIY KASTLESGVP | 60 |
| SRFSGSGSGT EFTLTISSLQ PDDFATYYCQ QYNTYWTFGQ GTKVEIK | 107 |
| M200-E11 HC | |
| EVQLLESGGG LVQPGGSLRL SCAASGFTFS HYIMMWVRQA PGKGLEWVSG IYSSGGITVY | 60 |
| ADSVKGRFTI SRDNSKNTLY LQMNSLRAED TAVYYCAYRR TGVPRRDAFD NWGQGTMVTV | 120 |
| SSASTKGPSV FPLAPSSKS | 139 |
| M200-F01 LC | |
| QDIQMTQSPS TLSASVGDRV TITCRASQSI SSWLAWYQQK PGKAPNLLIY KASTLESGVP | 60 |
| SRFSGSGSGT EFTLTISSLQ PDDFATYYCQ QYNTYWTFGQ GTKVEIK | 107 |
| M200-F01 HC | |
| EVQLLESGGG LVQPGGSLRL SCAASGFTFS HYIMMWVRQA PGKGLEWVSG IYSSGGITVY | 60 |
| ADSVKGRFTI SRDNSKNTLY LQMNSLRAED TAVYYCAYRR MGIPRRNAFD IWGQGTMVTV | 120 |
| SSASTKGPSV FPLAPSSKS | 139 |
| M200-H07 LC | |
| QDIQMTQSPS TLSASVGDRV TITCRASQSI SSWLAWYQQK PGKAPNLLIY KASTLESGVP | 60 |
| SRFSGSGSGT EFTLTISSLQ PDDFATYYCQ QYNTYWTFGQ GTKVEIK | 107 |
| M200-H07 HC | |
| EVQLLESGGG LVQPGGSLRL SCAASGFTFS HYIMMWVRQA PGKGLEWVSG IYSSGGITVY | 60 |
| ADSVKGRFTI SRDNSKNTLY LQMNSLRAED TAVYYCAYRR TGVPRRNAFD NWGQGTMVTV | 120 |
| SSASTKGPSV FPLAPSSKS | 139 |
| M201-A06 LC | |
| QDIQMTQSPS TLSASVGDRV TITCRASQSI SSWLAWYQQK PGKAPNLLIY KASTLESGVP | 60 |
| SRFSGSGSGT EFTLTISSLQ PDDFATYYCQ QYNTYWTFGQ GTKVEIK | 107 |
| M201-A06 HC | |
| EVQLLESGGG LVQPGGSLRL SCAASGFTFS HYIMMWVRQA PGKGLEWVSG IYSSGGITVY | 60 |
| ADSVKGRFTI SRDNSKNTLY LQMNSLRAED TAVYYCAYRR TGIPRRDVFD IWGQGTMVTV | 120 |
| SSASTKGPSV FPLAPSSKS | 139 |
| M201-A07 LC | |
| QDIQMTQSPS TLSASVGDRV TITCRASQSI SSWLAWYQQK PGKAPNLLIY KASTLESGVP | 60 |
| SRFSGSGSGT EFTLTISSLQ PDDFATYYCQ QYNTYWTFGQ GTKVEIK | 107 |
| M201-A07 HC | |
| EVQLLESGGG LVQPGGSLRL SCAASGFTFS HYIMMWVRQA PGKGLEWVSG IYSSGGITVY | 60 |
| ADSVKGRFTI SRDNSKNTLY LQMNSLRAED TAVYYCAYRR TGVPRRDEFD IWGQGTMVTV | 120 |
| SSASTKGPSV FPLAPSSKS | 139 |
| M201-F11 LC | |
| QDIQMTQSPS TLSASVGDRV TITCRASQSI SSWLAWYQQK PGKAPNLLIY KASTLESGVP | 60 |
| SRFSGSGSGT EFTLTISSLQ QPDDFATYYC QYNTYWTFGQ GTKVEIK | 107 |
| M201-F11 HC | |
| EVQLLESGGG LVQPGGSLRL SCAASGFTFS HYIMMWVRQA PGKGLEWVSG IYSSGGITVY | 60 |
| ADSVKGRFTI SRDNSKNTLY LQMNSLRAED TAVYYCAYRR SGIPRRDAFD IWGQGTMVTV | 120 |
| SSASTKGPSV FPLAPSSKS | 139 |
| M201-H06 LC | |
| QDIQMTQSPS TLSASVGDRV TITCRASQSI SSWLAWYQQK PGKAPNLLIY KASTLESGVP | 60 |
| SRFSGSGSGT EFTLTISSLQ PDDFATYYCQ QYNTYWTFGQ GTKVEIK | 107 |
| M201-H06 HC | |
| EVQLLESGGG LVQPGGSLRL SCAASGFTFS HYIMMWVRQA PGKGLEWVSG IYSSGGITVY | 60 |
| ADSVKGRFTI SRDNSKNTLY LQMNSLRAED TAVYYCAYRR TGVPRRDAFD IWGQGTMVTV | 120 |
| SSASTKGPSV FPLAPSSKS | 139 |
| M201-H08 LC | |
| QDIQMTQSPS TLSASVGDRV TITCRASQSI SSWLAWYQQK PGKAPNLLIY KASTLESGVP | 60 |
| SRFSGSGSGT EFTLTISSLQ PDDFATYYCQ QYNTYWTFGQ GTKVEIK | 107 |
| M201-H08 HC | |
| EVQLLESGGG LVQPGGSLRL SCAASGFTFS HYIMMWVRQA PGKGLEWVSG IYSSGGITVY | 60 |
| ADSVKGRFTI SRDNSKNTLY LQMNSLRAED TAVYYCAYRR TGVPRRDALD NWGQGTMVTV | 120 |
| SSASTKGPSV FPLAPSSKS | 139 |
| M202-A01 LC | |
| QDIQMTQSPS TLSASVGDRV TITCRASQSI SSWLAWYQQK PGKAPNLLIY KASTLESGVP | 60 |
| SRFSGSGSGT EFTLTISSLQ PDDFATYYCQ QYNTYWTFGQ GTKVEIK | 107 |
| M202-A01 HC | |
| EVQLLESGGG LVQPGGSLRL SCAASGFTFS HYIMMWVRQA PGKGLEWVSG IYSSGGITVY | 60 |
| ADSVKGRFTI SRDNSKNTLY LQMNSLRAED TAVYYCAYRR IGVPRRDAFD IWGQGTMVTV | 120 |
| SSASTKGPSV FPLAPSSKS | 139 |
| M202-A04 LC | |
| QDIQMTQSPS TLSASVGDRV TITCRASQSI SSWLAWYQQK PGKAPNLLIY KASTLESGVP | 60 |
| SRFSGSGSGT EFTLTISSLQ PDDFATYYCQ QYNTYWTFGQ GTKVEIK | 107 |
| M202-A04 HC | |
| EVQLLESGGG LVQPGGSLRL SCAASGFTFS HYIMMWVRQA PGKGLEWVSG IYSSGGITVY | 60 |
| ADSVKGRFTI SRDNSKNTLY LQMNSLRAED TAVYYCAYRR KGIPRRDDFD IWGQGTMVTV | 120 |
| SSASTKGPSV FPLAPSSKS | 139 |
| M202-A08 LC | |
| QDIQMTQSPS TLSASVGDRV TITCRASQSI SSWLAWYQQK PGKAPNLLIY KASTLESGVP | 60 |
| SRFSGSGSGT EFTLTISSLQ PDDFATYYCQ QYNTYWTFGQ GTKVEIK | 107 |
| M202-A08 HC | |
| EVQLLESGGG LVQPGGSLRL SCAASGFTFS HYIMMWVRQA PGKGLEWVSG IYSSGGITVY | 60 |
| ADSVKGRFTI SRDNSKNTLY LQMNSLRAED TAVYYCAYRR TGIPRWDAFD IWGQGTMVTV | 120 |
| SSASTKGPSV FPLAPSSKS | 139 |
| M202-A10 LC | |
| QDIQMTQSPS TLSASVGDRV TITCRASQSI SSWLAWYQQK PGKAPNLLIY KASTLESGVP | 60 |
| SRFSGSGSGT EFTLTISSLQ PDDFATYYCQ QYNTYWTFGQ GTKVEIK | 107 |
| M202-A10 HC | |
| EVQLLESGGG LVQPGGSLRL SCAASGFTFS HYIMMWVRQA PGKGLEWVSG IYSSGGITVY | 60 |
| ADSVKGRFTI SRDNSKNTLY LQMNSLRAED TAVYYCAFRR TGIPRRDSFD IWGQGTMVTV | 120 |
| SSASTKGPSV FPLAPSSKS | 139 |
| M202-A12 LC | |
| QDIQMTQSPS TLSASVGDRV TITCRASQSI SSWLAWYQQK PGKAPNLLIY KASTLESGVP | 60 |
| SRFSGSGSGT EFTLTISSLQ PDDFATYYCQ QYNTYWTFGQ GTKVEIK | 107 |
| M202-A12 HC | |
| EVQLLESGGG LVQPGGSLRL SCAASGFTFS HYIMMWVRQA PGKGLEWVSG IYSSGGITVY | 60 |
| ADSVKGRFTI SRDNSKNTLY LQMNSLRAED TAVYYCAYQR TGVPRRDSFN IWGQGTMVTV | 120 |
| SSASTKGPSV FPLAPSSKS | 139 |
| M202-B03 LC | |
| QDIQMTQSPS TLSASVGDRV TITCRASQSI SSWLAWYQQK PGKAPNLLIY KASTLESGVP | 60 |
| SRFSGSGSGT EFTLTISSLQ PDDFATYYCQ QYNTYWTFGQ GTKVEIK | 107 |
| M202-B03 HC | |
| EVQLLESGGG LVQPGGSLRL SCAASGFTFS HYIMMWVRQA PGKGLEWVSG IYSSGGITVY | 60 |
| ADSVKGRFTI SRDNSKNTLY LQMNSLRAED TAVYYCAYRR TGVPRRDDFD IWGQGTMVTV | 120 |
| SSASTKGPSV FPLAPSSKS | 139 |
| M202-B04 LC | |
| QDIQMTQSPS TLSASVGDRV TITCRASQSI SSWLAWYQQK PGKAPNLLIY KASTLESGVP | 60 |
| SRFSGSGSGT EFTLTISSLQ PDDFATYYCQ QYNTYWTFGQ GTKVEIK | 107 |
| M202-B04 HC | |
| EVQLLESGGG LVQPGGSLRL SCAASGFTFS HYIMMWVRQA PGKGLEWVSG IYSSGGITVY | 60 |
| ADSVKGRFTI SRDNSKNTLY LQMNSLRAED TAVYYCAYRR SGVPRRDDFD IWGQGTMVTV | 120 |
| SSASTKGPSV FPLAPSSKS | 139 |
| M202-C01 LC | |
| QDIQMTQSPS TLSASVGDRV TITCRASQSI SSWLAWYQQK PGKAPNLLIY KASTLESGVP | 60 |
| SRFSGSGSGT EFTLTISSLQ PDDFATYYCQ QYNTYWTFGQ GTKVEIK | 107 |
| M202-C01 HC | |
| EVQLLESGGG LVQPGGSLRL SCAASGFTFS HYIMMWVRQA PGKGLEWVSG IYSSGGITVY | 60 |
| ADSVKGRFTI SRDNSKNTLY LQMNSLRAED TAVYYCAYRR TGVPRWDDFD IWGQGTMVTV | 120 |
| SSASTKGPSV FPLAPSSKS | 139 |
| M202-C02 LC | |
| QDIQMTQSPS TLSASVGDRV TITCRASQSI SSWLAWYQQK PGKAPNLLIY KASTLESGVP | 60 |
| SRFSGSGSGT EFTLTISSLQ PDDFATYYCQ QYNTYWTFGQ GTKVEIK | 107 |
| M202-C02 HC | |
| EVQLLESGGG LVQPGGSLRL SCAASGFTFS HYIMMWVRQA PGKGLEWVSG IYSSGGITVY | 60 |
| ADSVKGRFTI SRDNSKNTLY LQMNSLRAED TAVYYCAYRR PGVPRRDAFD IWGQGTMVTV | 120 |
| SSASTKGPSV FPLAPSSKS | 139 |
| M202-C09 LC | |
| QDIQMTQSPS TLSASVGDRV TITCRASQSI SSWLAWYQQK PGKAPNLLIY KASTLESGVP | 60 |
| SRFSGSGSGT EFTLTISSLQ PDDFATYYCQ QYNTYWTFGQ GTKVEIK | 107 |
| M202-C09 HC | |
| EVQLLESGGG LVQPGGSLRL SCAASGFTFS HYIMMWVRQA PGKGLEWVSG IYSSGGITVY | 60 |
| ADSVKGRFTI SRDNSKNTLY LQMNSLRAED TAVYYCAYRR IGVPRRDDFD IWGQGTMVTV | 120 |
| SSASTKGPSV FPLAPSSKS | 139 |
| M202-D09 LC | |
| QDIQMTQSPS TLSASVGDRV TITCRASQSI SSWLAWYQQK PGKAPNLLIY KASTLESGVP | 60 |
| SRFSGSGSGT EFTLTISSLQ PDDFATYYCQ QYNTYWTFGQ GTKVEIK | 107 |
| M202-D09 HC | |
| EVQLLESGGG LVQPGGSLRL SCAASGFTFS HYIMMWVRQA PGKGLEWVSG IYSSGGITVY | 60 |
| ADSVKGRFTI SRDNSKNTLY LQMNSLRAED TAVYYCAYRR IGVPRRDSFD IWGQGTMVTV | 120 |
| SSASTKGPSV FPLAPSSKS | 139 |
| M202-E03 LC | |
| QDIQMTQSPS TLSASVGDRV TITCRASQSI SSWLAWYQQK PGKAPNLLIY KASTLESGVP | 60 |
| SRFSGSGSGT EFTLTISSLQ PDDFATYYCQ QYNTYWTFGQ GTKVEIK | 107 |
| M202-E03 HC | |
| EVQLLESGGG LVQPGGSLRL SCAASGFTFS HYIMMWVRQA PGKGLEWVSG IYSSGGITVY | 60 |
| ADSVKGRFTI SRDNSKNTLY LQMNSLRAED TAVYYCAYRR TGIPRRDAFE IWGQGTMVTV | 120 |
| SSASTKGPSV FPLAPSSKS | 139 |
| M202-E06 LC | |
| QDIQMTQSPS TLSASVGDRV TITCRASQSI SSWLAWYQQK PGKAPNLLIY KASTLESGVP | 60 |
| SRFSGSGSGT EFTLTISSLQ PDDFATYYCQ QYNTYWTFGQ GTKVEIK | 107 |
| M202-E06 HC | |
| EVQLLESGGG LVQPGGSLRL SCAASGFTFS HYIMMWVRQA PGKGLEWVSG IYSSGGITVY | 60 |
| ADSVKGRFTI SRDNSKNTLY LQMNSLRAED TAVYYCAYRR RGVPRRDDFD IWGQGTMVTV | 120 |
| SSASTKGPSV FPLAPSSKS | 139 |
| M202-F06 LC | |
| QDIQMTQSPS TLSASVGDRV TITCRASQSI SSWLAWYQQK PGKAPNLLIY KASTLESGVP | 60 |
| SRFSGSGSGT EFTLTISSLQ PDDFATYYCQ QYNTYWTFGQ GTKVEIK | 107 |
| M202-F06 HC | |
| EVQLLESGGG LVQPGGSLRL SCAASGFTFS HYIMMWVRQA PGKGLEWVSG IYSSGGITVY | 60 |
| ADSVKGRFTI SRDNSKNTLY LQMNSLRAED TAVYYCAYRR TGVPRWDAFD IWGQGTMVTV | 120 |
| SSASTKGPSV FPLAPSSKS | 139 |
| M202-G03 LC | |
| QDIQMTQSPS TLSASVGDRV TITCRASQSI SSWLAWYQQK PGKAPNLLIY KASTLESGVP | 60 |
| SRFSGSGSGT EFTLTISSLQ PDDFATYYCQ QYNTYWTFGQ GTKVEIK | 107 |
| M202-G03 HC | |
| EVQLLESGGG LVQPGGSLRL SCAASGFTFS HYIMMWVRQA PGKGLEWVSG IYSSGGITVY | 60 |
| ADSVKGRFTI SRDNSKNTLY LQMNSLRAED TAVYYCAFRR TGVPRRDSFE IWGQGTMVTV | 120 |
| SSASTKGPSV FPLAPSSKS | 139 |
| M202-H03 LC | |
| QDIQMTQSPS TLSASVGDRV TITCRASQSI SSWLAWYQQK PGKAPNLLIY KASTLESGVP | 60 |
| SRFSGSGSGT EFTLTISSLQ PDDFATYYCQ QYNTYWTFGQ GTKVEIK | 107 |
| M202-H03 HC | |
| EVQLLESGGG LVQPGGSLRL SCAASGFTFS HYIMMWVRQA PGKGLEWVSG IYSSGGITVY | 60 |
| ADSVKGRFTI SRDNSKNTLY LQMNSLRAED TAVYYCAFRR TGVPRWDDFD IWGQGTMVTV | 120 |
| SSASTKGPSV FPLAPSSKS | 139 |
| M202-H05 LC | |
| QDIQMTQSPS TLSASVGDRV TITCRASQSI SSWLAWYQQK PGKAPNLLIY KASTLESGVP | 60 |
| SRFSGSGSGT EFTLTISSLQ PDDFATYYCQ QYNTYWTFGQ GTKVEIK | 107 |
| M202-H05 HC | |
| EVQLLESGGG LVQPGGSLRL SCAASGFTFS HYIMMWVRQA PGKGLEWVSG IYSSGGITVY | 60 |
| ADSVKGRFTI SRDNSKNTLY LQMNSLRAED TAVYYCAFRR TGVPRRDVFD IWGQGTMVTV | 120 |
| SSASTKGPSV FPLAPSSKS | 139 |

TABLE 9
Sequences of Antibodies Obtained from CDR1/2 and CDR3 Spiking Affinity Maturation Libraries Based
on X63-G06

| | % | human | | | | | | |
|---|---|---|---|---|---|---|---|---|
| | inhib- | pKal | | | | | | |
| | ition | Ki, | | | | | | |
| Antibody | at | app | | | | HV- | | |
| I.D. | 10 nM | (nM) | LV-CDR1 | LV-CDR2 | LV-CDR3 | CDR1 | HV-CDR2 | HV-CDR3 |
| M209-F04 | 97.6 | 0.09 | RTSQFVNSNYLA | GASSRAT | QQSSRTPWT | HYLMT | YISPSGGHTIYADSVKG | VARGIAARSRTSYLDq |
| M209-C11 | 96.2 | 0.14 | RTSQFVNSNYLA | GASSRAT | QQSSRTPWT | HYLMT | YISPSGGHTIYADSVKG | VGQGIRGRSRTSYFAq |
| M206-H08 | 96.0 | 0.17 | RTSQFVNSNYLA | GASSRAT | QQSSRTPWT | DYMMA | SIVPSGGHTHYADSVKG | VARGIAARSRTSYFDY |
| M210-C12 | 95.6 | 0.16 | RTSQFVNSNYLA | GASSRAT | QQSSRTPWT | HYLMT | YISPSGGHTIYADSVKG | VAQGIAARSRTSSVDq |
| M208-F04 | 95.4 | 0.2 | RTSQFVNSNYLA | GASSRAT | QQSSRTPWT | HYLMT | YISPSGGHTIYADSVKG | VARGIAARSRTSFFDY |
| M206-B10 | 94.7 | 0.3 | RTSQFVNSNYLA | GASSRAT | QQSSRTPWT | qYLMA | SIYPSGGWTKYADSVKG | VARGIAARSRTSYFDY |
| M208-H02 | 94.4 | 0.2 | RTSQFVNSNYLA | GASSRAT | QQSSRTPWT | HYLMT | YISPSGGHTIYADSVKG | VARGIASRSRTRYCDY |
| M210-G04 | 94.2 | 0.3 | RTSQFVNSNYLA | GASSRAT | QQSSRTPWT | HYLMT | YISPSGGHTIYADSVKG | VATGIVARSRTRYFDq |
| M210-H06 | 93.8 | 0.2 | RTSQFVNSNYLA | GASSRAT | QQSSRTPWT | HYLMT | YISPSGGHTIYADSVKG | VARGIAARSRTRYFDY |
| M208-E10 | 93.7 | 0.09 | RTSQFVNSNYLA | GASSRAT | QQSSRTPWT | HYLMT | YISPSGGHTIYADSVKG | VAQGISARSRTSYFDY |
| M209-B09 | 93.5 | 0.2 | RTSQFVNSNYLA | GASSRAT | QQSSRTPWT | HYLMT | YISPSGGHTIYADSVKG | VAQGIVARSRTSYLHq |
| M209-C12 | 93.4 | | RTSQFVNSNYLA | GASSRAT | QQSSRTPWT | HYLMT | YISPSGGHTIYADSVKG | VGRGIAARSRTSqLDY |
| M208-G03 | 93.4 | 0.3 | RTSQFVNSNYLA | GASSRAT | QQSSRTPWT | HYLMT | YISPSGGHTIYADSVKG | VARGIAARSRTSYLDY |
| M206-A06 | 93.0 | | RTSQFVNSNYLA | GASSRAT | QQSSRTPWT | NYMMG | SISPSGGLTKYADSVKG | VARGIAARSRTSYFDY |
| M210-H07 | 92.8 | 0.4 | RTSQFVNSNYLA | GASSRAT | QQSSRTPWT | HYLMT | YISPSGGHTIYADSVKG | VARGIAARSRTRYFDq |
| M206-F01 | 92.6 | 0.2 | RTSQFVNSNYLA | GASSRAT | QQSSRTPWT | GYMMV | RISPSGGPTIYADSVKG | VARGIAARSRTSYFDY |
| M208-F10 | 92.5 | 0.2 | RTSQFVNSNYLA | GASSRAT | QQSSRTPWT | HYLMT | YISPSGGHTIYADSVKG | VARGIAARSRTSYFDq |
| M209-E02 | 92.4 | 0.3 | RTSQFVNSNYLA | GASSRAT | QQSSRTPWT | HYLMT | YISPSGGHTIYADSVKG | VARGIAARSRTILLDq |
| M208-C06 | 91.7 | 0.4 | RTSQFVNSNYLA | GASSRAT | QQSSRTPWT | HYLMT | YISPSGGHTIYADSVKG | VARGIAARSRTSFIDY |
| M205-D04 | 91.5 | 0.4 | RTSQFVNSNYLA | GASSRAT | QQSSRTPWT | TYKMq | SISPSGGPTNYADSVKG | VARGIAARSRTSYFDY |
| M210-G10 | 91.2 | 0.4 | RTSQFVNSNYLA | GASSRAT | QQSSRTPWT | HYLMT | YISPSGGHTIYADSVKG | VARGIAARSRTSYLDF |
| M207-A04 | 90.9 | | RTSQFVNSNYLA | GASSRAT | QQSSRTPWT | HYLMT | YISPSGGHTIYADSVKG | VARGIAARSRTRSFDY |
| M210-B02 | 90.9 | 0.2 | RTSQFVNSNYLA | GASSRAT | QQSSRTPWT | HYLMT | YISPSGGHTIYADSVKG | VARGIAARSRTSYFNq |
| M208-B01 | 90.1 | | RTSQFVNSNYLA | GASSRAT | QQSSRTPWT | HYLMT | YISPSGGHTIYADSVKG | VARGIAARSRTSFFDq |
| M209-G07 | 89.8 | | RTSQFVNSNYLA | GASSRAT | QQSSRTPWT | HYLMT | YISPSGGHTIYADSVKG | VARGIAARSRTSYFDT |
| M204-A02 | 89.5 | | RTSQFVNSNYLA | GASSRAT | QQSSRTPWT | DYMMT | YISPSGGLTSYADSVKG | VARGIAARSRTSYFDY |
| M206-H01 | 87.6 | | RTSQFVNSNYLA | GASSRAT | QQSSRTPWT | EYMMV | RISPSGGTTEYADSVKG | VARGIAARSRTSYFDY |
| M209-B11 | 87.3 | | RTSQFVNSNYLA | GASSRAT | QQSSRTPWT | HYLMT | YISPSGGHTIYADSVKG | VARGIAARSRTRYIDq |
| M206-F09 | 86.8 | | RTSQFVNSNYLA | GASSRAT | QQSSRTPWT | VYMMS | SIVPSGGSTTYADSVKG | VARGIAARSRTSYFDY |
| M209-C02 | 86.8 | | RTSQFVNSNYLA | GASSRAT | QQSSRTPWT | HYLMT | YISPSGGHTIYADSVKG | VARGIAYRRRTSYFDY |
| M208-G02 | 86.7 | | RTSQFVNSNYLA | GASSRAT | QQSSRTPWT | HYLMT | YISPSGGHTIYADSVKG | VARGIADRSRTSYSDY |
| M205-C11 | 86.5 | | RTSQFVNSNYLA | GASSRAT | QQSSRTPWT | QYMMM | RISPSGGSTLYADSVKG | VARGIAARSRTSYFDY |
| M205-H08 | 85.9 | | RTSQFVNSNYLA | GASSRAT | QQSSRTPWT | DYMMM | SIVPSGGHTqYADSVKG | VARGIAARSRTSYFDY |
| M210-H01 | 85.5 | | RTSQFVNSNYLA | GASSRAT | QQSSRTPWT | HYLMT | YISPSGGHTIYADSVKG | VARGIAARSRNSqQDY |
| M209-D12 | 85.4 | | RTSQFVNSNYLA | GASSRAT | QQSSRTPWT | HYLMT | YISPSGGHTIYADSVKG | VARGIAARSRTSYFDq |
| M209-H09 | 85.3 | | RTSQFVNSNYLA | GASSRAT | QQSSRTPWT | HYLMT | YISPSGGHTIYADSVKG | VARGIAARSRTVYFDH |
| M204-E12 | 84.1 | | RTSQFVNSNYLA | GASSRAT | QQSSRTPWT | TYMMq | YIGPSGGKTDYADSVKG | VARGIAARSRTSYFDY |
| M209-H03 | 82.6 | | RTSQFVNSNYLA | GASSRAT | QQSSRTPWT | HYLMT | YISPSGGHTIYADSVKG | VAQGIAARSRTTqFDY |
| M206-H05 | 82.5 | | RTSQFVNSNYLA | GASSRAT | QQSSRTPWT | GYKMq | SISPSGGITMYADSVKG | VARGIAARSRTSYFDY |
| M209-D03 | 80.4 | | RTSQFVNSNYLA | GASSRAT | QQSSRTPWT | HYLMT | YISPSGGHTIYADSVKG | VGRGIAARSRTSFFDq |
| M205-A02 | 80.3 | | RTSQFVNSNYLA | GASSRAT | QQSSRTPWT | TYLMA | GIVSSGGRTLYADSVKG | VARGIAARSRTSYFDY |
| M208-A10 | 78.5 | | RTSQFVNSNYLA | GASSRAT | QQSSRTPWT | HYLMT | YISPSGGHTIYADSVKG | VARGIAARSRTSqFDH |
| M205-E11 | 78.2 | | RTSQFVNSNYLA | GASSRAT | QQSSRTPWT | NYTMG | SISPSGGKTDYADSVKG | VARGIAARSRTSYFDY |
| M206-E02 | 77.6 | | RTSQFVNSNYLA | GASSRAT | QQSSRTPWT | EYMMM | VISPSGGQTHYADSVKG | VARGIAARSRTSYFDY |
| M205-H01 | 77.1 | | RTSQFVNSNYLA | GASSRAT | QQSSRTPWT | NYTMQ | YISPSGGYTGYADSVKG | VARGIAARSRTSYFDY |
| M207-A02 | 76.6 | | RTSQFVNSNYLA | GASSRAT | QQSSRTPWT | HYLMT | YISPSGGHTIYADSVKG | VARGIAARSRTINLDY |
| M209-H07 | 76.1 | | RTSQFVNSNYLA | GASSRAT | QQSSRTPWT | HYLMT | YISPSGGHTIYADSVKG | VARGIAARqRTSYYDY |
| M209-G01 | 74.8 | | RTSQFVNSNYLA | GASSRAT | QQSSRTPWT | HYLMT | YISPSGGHTIYADSVKG | VAqGISGRSRLSYVDY |
| M21O-AO6 | 74.8 | | RTSQFVNSNYLA | GASSRAT | QQSSRTPWT | HYLMT | YISPSGGHTIYADSVKG | VARGIAARSRTSqFDY |
| M209-D02 | 74.7 | | RTSQFVNSNYLA | GASSRAT | QQSSRTPWT | HYLMT | YISPSGGHTIYADSVKG | VARGITARSRTSYFDD |
| M205-B04 | 71.1 | | RTSQFVNSNYLA | GASSRAT | QQSSRTPWT | NYDMI | SISSSGGTTKYADSVKG | VARGIAARSRTSYFDY |
| M203-A03 | 69.1 | | RTSQFVNSNYLA | GASSRAT | QQSSRTPWT | VYMMI | SISPSGGQTTYADSVKG | VARGIAARSRTSYFDY |
| M209-E03 | 68.8 | | RTSQFVNSNYLA | GASSRAT | QQSSRTPWT | HYLMT | YISPSGGHTIYADSVKG | qARGIAARSRTSYFDY |
| M207-A01 | 67.2 | | RTSQFVNSNYLA | GASSRAT | QQSSRTPWT | HYLMT | YISPSGGHTIYADSVKG | VARGISARSRTSCFDY |
| M206-C03 | 65.5 | | RTSQFVNSNYLA | GASSRAT | QQSSRTPWT | qYMMV | SIYSSGGNTPYADSVKG | VARGIAARSRTSYFDY |
| M207-C05 | 61.4 | | RTSQFVNSNYLA | GASSRAT | QQSSRTPWT | HYLMT | YISPSGGHTIYADSVKG | VGRGIAARSRTSYFDK |
| M205-A12 | 58.8 | | RTSQFVNSNYLA | GASSRAT | QQSSRTPWT | QYDMI | YISSSGGFTRYADSVKG | VARGIAARSRTSYFDY |
| M205-F03 | 58.6 | | RTSQFVNSNYLA | GASSRAT | QQSSRTPWT | SqQMV | YISPSGGNTYYADSVKG | VARGIAARSRTSYFDY |
| M203-A01 | 51.4 | | RTSQFVNSNYLA | GASSRAT | QQSSRTPWT | NYLMA | WIVPSGGYTEYADSVKG | VARGIAARSRTSYFDY |
| M209-B01 | 47.0 | | RTSQFVNSNYLA | GASSRAT | QQSSRTPWT | HYLMT | YISPSGGHTIYADSVKG | VARGIVARSRTSNFDq |
| M208-D12 | 43.7 | | RTSQFVNSNYLA | GASSRAT | QQSSRTPWT | HYLMT | YISPSGGHTIYADSVKG | LARGIAARSRTSYqDI |
| M206-H04 | 19.0 | | RTSQFVNSNYLA | GASSRAT | QQSSRTPWT | SYMMV | SISPSGGYTIqADSVKG | VARGIAARSRTSYFDY |

[0948] Amino acid sequences of light chain (LC) and heavy chain (HC) variable domain of pKal antibodies obtained from CDR1/2 and CDR3 spiking affinity maturation libraries based on X63-G06.

| M203-A01 LC | |
|---|---|
| QDIQMTQSPG TLSLSPGERA TLSCRTSQFV NSNYLAWYQQ TPGQAPRLLI YGASSRATGI | 60 |
| PDRFSGTGYG TDFTLTISRL EPEDYGTYYC QQSSRTPWTF GQGTRVEIK | 109 |
| M203-A01 HC | |
| EVQLLESGGG LVQPGGSLRL SCAASGFTFS NYLMAWVRQA PGKGLEWVSW IVPSGGYTEY | 60 |
| ADSVKGRFTI SRDNSKNTLY LQMNSLRAED TAVYYCARVA RGIAARSRTS YFDYWGQGTL | 120 |
| VTVSSASTKG PSVFPLAPSS KS | 142 |
| M203-A03 LC | |
| QDIQMTQSPG TLSLSPGERA TLSCRTSQFV NSNYLAWYQQ TPGQAPRLLI YGASSRATGI | 60 |
| PDRFSGTGYG TDFTLTISRL EPEDYGTYYC QQSSRTPWTF GQGTRVEIK | 109 |
| M203-A03 HC | |
| EVQLLESGGG LVQPGGSLRL SCAASGFTFS VYMMIWVRQA PGKGLEWVSS ISPSGGQTTY | 60 |
| ADSVKGRFTI SRDNSKNTLY LQMNSLRAED TAVYYCARVA RGIAARSRTS YFDYWGQGTL | 120 |
| VTVSSASTKG PSVFPLAPSS KS | 142 |
| M204-A02 LC | |
| QDIQMTQSPG TLSLSPGERA TLSCRTSQFV NSNYLAWYQQ TPGQAPRLLI YGASSRATGI | 60 |
| PDRFSGTGYG TDFTLTISRL EPEDYGTYYC QQSSRTPWTF GQGTRVEIK | 109 |
| M204-A02 HC | |
| EVQLLESGGG LVQPGGSLRL SCAASGFTFS DYMMTWVRQA PGKGLqWVSY ISPSGGLTSY | 60 |
| ADSVKGRFTI SRDNSKNTLY LQMNSLRAED TAVYYCARVA RGIAARSRTS YFDYWGQGTL | 120 |
| VTVSSASTKG PSVFPLAPSS KS | 142 |
| M204-E12 LC | |
| QDIQMTQSPG TLSLSPGERA TLSCRTSQFV NSNYLAWYQQ TPGQAPRLLI YGASSRATGI | 60 |
| PDRFSGTGYG TDFTLTISRL EPEDYGTYYC QQSSRTPWTF GQGTRVEIK | 109 |
| M204-E12 HC | |
| EVQLLESGGG LVQPGGSLRL SCAASGFTFS TYMMqWVRQA PGKGLEWVSY IGPSGGKTDY | 60 |
| ADSVKGRFTI SRDNSKNTLY LQMNSLRAED TAVYYCARVA RGIAARSRTS YFDYWGQGTL | 120 |
| VTVSSASTKG PSVFPLAPSS KS | 142 |
| M205-A02 LC | |
| QDIQMTQSPG TLSLSPGERA TLSCRTSQFV NSNYLAWYQQ TPGQAPRLLI YGASSRATGI | 60 |
| PDRFSGTGYG TDFTLTISRL EPEDYGTYYC QQSSRTPWTF GQGTRVEIK | 109 |
| M205-A02 HC | |
| EVQLLESGGG LVQPGGSLRL SCAASGFTFS TYLMAWVRQA PGKGLEWVSG IVSSGGRTLY | 60 |
| ADSVKGRFTI SRDNSKNTLY LQMNSLRAED TAVYYCARVA RGIAARSRTS YFDYWGQGTL | 120 |
| VTVSSASTKG PSVFPLAPSS KS | 142 |
| M205-A12 LC | |
| QDIQMTQSPG TLSLSPGERA TLSCRTSQFV NSNYLAWYQQ TPGQAPRLLI YGASSRATGI | 60 |
| PDRFSGTGYG TDFTLTISRL EPEDYGTYYC QQSSRTPWTF GQGTRVEIK | 109 |
| M205-A12 HC | |
| EVQLLESGGG LVQPGGSLRL SCAASGFTFS QYDMIWVRQA PGKGLEWVSY ISSSGGFTRY | 60 |
| ADSVKGRFTI SRDNSKNTLY LQMNSLRAED TAVYYCARVA RGIAARSRTS YFDYWGQGTL | 120 |
| VTVSSASTKG PSVFPLAPSS KS | 142 |
| M205-B04 LC | |
| QDIQMTQSPG TLSLSPGERA TLSCRTSQFV NSNYLAWYQQ TPGQAPRLLI YGASSRATGI | 60 |
| PDRFSGTGYG TDFTLTISRL EPEDYGTYYC QQSSRTPWTF GQGTRVEIK | 109 |
| M205-B04 HC | |
| EVQLLESGGG LVQPGGSLRL SCAASGFTFS NYDMIWVRQA PGKGLEWVSS ISSSGGTTKY | 60 |
| ADSVKGRFTI SRDNSKNTLY LQMNSLRAED TAVYYCARVA RGIAARSRTS YFDYWGQGTL | 120 |
| VTVSSASTKG PSVFPLAPSS KS | 142 |
| M205-C11 LC | |
| QDIQMTQSPG TLSLSPGERA TLSCRTSQFV NSNYLAWYQQ TPGQAPRLLI YGASSRATGI | 60 |
| PDRFSGTGYG TDFTLTISRL EPEDYGTYYC QQSSRTPWTF GQGTRVEIK | 109 |
| M205-C11 HC | |
| EVQLLESGGG LVQPGGSLRL SCAASGFTFS QYMMMWVRQA PGKGLEWVSR ISPSGGSTLY | 60 |
| ADSVKGRFTI SRDNSKNTLY LQMNSLRAED TAVYYCARVA RGIAARSRTS YFDYWGQGTL | 120 |
| VTVSSASTKG PSVFPLAPSS KS | 142 |
| M205-D04 LC | |
| QDIQMTQSPG TLSLSPGERA TLSCRTSQFV NSNYLAWYQQ TPGQAPRLLI YGASSRATGI | 60 |
| PDRFSGTGYG TDFTLTISRL EPEDYGTYYC QQSSRTPWTF GQGTRVEIK | 109 |
| M205-D04 HC | |
| EVQLLESGGG LVQPGGSLRL SCAASGFTFS TYKMqWVRQA PGKGLEWVSS ISPSGGPTNY | 60 |
| ADSVKGRFTI SRDNSKNTLY LQMNSLRAED TAVYYCARVA RGIAARSRTS YFDYWGQGTL | 120 |
| VTVSSASTKG PSVFPLAPSS KS | 142 |
| M205-E11 LC | |
| QDIQMTQSPG TLSLSPGERA TLSCRTSQFV NSNYLAWYQQ TPGQAPRLLI YGASSRATGI | 60 |
| PDRFSGTGYG TDFTLTISRL EPEDYGTYYC QQSSRTPWTF GQGTRVEIK | 109 |
| M205-E11 HC | |
| EVQLLESGGG LVQPGGSLRL SCAASGFTFS NYTMGWVRQA PGKGLEWVSS ISPSGGKTDY | 60 |
| ADSVKGRFTI SRDNSKNTLY LQMNSLRAED TAVYYCARVA RGIAARSRTS YFDYWGQGTL | 120 |
| VTVSSASTKG PSVFPLAPSS KS | 142 |
| M205-F03 LC | |
| QDIQMTQSPG TLSLSPGERA TLSCRTSQFV NSNYLAWYQQ TPGQAPRLLI YGASSRATGI | 60 |
| PDRFSGTGYG TDFTLTISRL EPEDYGTYYC QQSSRTPWTF GQGTRVEIK | 109 |
| M205-F03 HC | |
| EVQLLESGGG LVQPGGSLRL SCAASGFTFS SqQMVWVRQA PGKGLEWVSY ISPSGGNTYY | 60 |
| ADSVKGRFTI SRDNSKNTLY LQMNSLRAED TAVYYCARVA RGIAARSRTS YFDYWGQGTL | 120 |
| VTVSSASTKG PSVFPLAPSS KS | 142 |
| M205-H01 LC | |
| QDIQMTQSPG TLSLSPGERA TLSCRTSQFV NSNYLAWYQQ TPGQAPRLLI YGASSRATGI | 60 |
| PDRFSGTGYG TDFTLTISRL EPEDYGTYYC QQSSRTPWTF GQGTRVEIK | 109 |
| M205-H01 HC | |
| EVQLLESGGG LVQPGGSLRL SCAASGFTFS NYTMQWVRQA PGKGLqWVSY ISPSGGYTGY | 60 |
| ADSVKGRFTI SRDNSKNTLY LQMNSLRAED TAVYYCARVA RGIAARSRTS YFDYWGQGTL | 120 |
| VTVSSASTKG PSVFPLAPSS KS | 142 |
| M205-H08 LC | |
| QDIQMTQSPG TLSLSPGERA TLSCRTSQFV NSNYLAWYQQ TPGQAPRLLI YGASSRATGI | 60 |
| PDRFSGTGYG TDFTLTISRL EPEDYGTYYC QQSSRTPWTF GQGTRVEIK | 109 |
| M205-H08 HC | |
| EVQLLESGGG LVQPGGSLRL SCAASGFTFS DYMMMWVRQA PGKGLEWVSS IVPSGGHTqY | 60 |
| ADSVKGRFTI SRDNSKNTLY LQMNSLRAED TAVYYCARVA RGIAARSRTS YFDYWGQGTL | 120 |
| VTVSSASTKG PSVFPLAPSS KS | 142 |
| M206-A06 LC | |
| QDIQMTQSPG TLSLSPGERA TLSCRTSQFV NSNYLAWYQQ TPGQAPRLLI YGASSRATGI | 60 |
| PDRFSGTGYG TDFTLTISRL EPEDYGTYYC QQSSRTPWTF GQGTRVEIK | 109 |
| M206-A06 HC | |
| EVQLLESGGG LVQPGGSLRL SCAASGFTFS NYMMGWVRQA PGKGLqWVSS ISPSGGLTKY | 60 |
| ADSVKGRFTI SRDNSKNTLY LQMNSLRAED TAVYYCARVA RGIAARSRTS YFDYWGQGTL | 120 |
| VTVSSASTKG PSVFPLAPSS KS | 142 |
| M206-B10 LC | |
| QDIQMTQSPG TLSLSPGERA TLSCRTSQFV NSNYLAWYQQ TPGQAPRLLI YGASSRATGI | 60 |
| PDRFSGTGYG TDFTLTISRL EPEDYGTYYC QQSSRTPWTF GQGTRVEIK | 109 |
| M206-B10 HC | |
| EVQLLESGGG LVQPGGSLRL SCAASGFTFS qYLMAWVRQA PGKGLEWVSS IYPSGGWTKY | 60 |
| ADSVKGRFTI SRDNSKNTLY LQMNSLRAED TAVYYCARVA RGIAARSRTS YFDYWGQGTL | 120 |
| VTVSSASTKG PSVFPLAPSS KS | 142 |
| M206-C03 LC | |
| QDIQMTQSPG TLSLSPGERA TLSCRTSQFV NSNYLAWYQQ TPGQAPRLLI YGASSRATGI | 60 |
| PDRFSGTGYG TDFTLTISRL EPEDYGTYYC QQSSRTPWTF GQGTRVEIK | 109 |
| M206-C03 HC | |
| EVQLLESGGG LVQPGGSLRL SCAASGFTFS qYMMVWVRQA PGKGLEWVSS IYSSGGNTPY | 60 |
| ADSVKGRFTI SRDNSKNTLY LQMNSLRAED TAVYYCARVA RGIAARSRTS YFDYWGQGTL | 120 |
| VTVSSASTKG PSVFPLAPSS KS | 142 |
| M206-E02 LC | |
| QDIQMTQSPG TLSLSPGERA TLSCRTSQFV NSNYLAWYQQ TPGQAPRLLI YGASSRATGI | 60 |
| PDRFSGTGYG TDFTLTISRL EPEDYGTYYC QQSSRTPWTF GQGTRVEIK | 109 |
| M206-E02 HC | |
| EVQLLESGGG LVQPGGSLRL SCAASGFTFS EYMMMWVRQA PGKGLEWVSV ISPSGGQTHY | 60 |
| ADSVKGRFTI SRDNSKNTLY LQMNSLRAED TAVYYCARVA RGIAARSRTS YFDYWGQGTL | 120 |
| VTVSSASTKG PSVFPLAPSS KS | 142 |
| M206-F01 LC | |
| QDIQMTQSPG TLSLSPGERA TLSCRTSQFV NSNYLAWYQQ TPGQAPRLLI YGASSRATGI | 60 |
| PDRFSGTGYG TDFTLTISRL EPEDYGTYYC QQSSRTPWTF GQGTRVEIK | 109 |
| M206-F01 HC | |
| EVQLLESGGG LVQPGGSLRL SCAASGFTFS GYMMVWVRQA PGKGLEWVSR ISPSGGPTIY | 60 |
| ADSVKGRFTI SRDNSKNTLY LQMNSLRAED TAVYYCARVA RGIAARSRTS YFDYWGQGTL | 120 |
| VTVSSASTKG PSVFPLAPSS KS | 142 |
| M206-F09 LC | |
| QDIQMTQSPG TLSLSPGERA TLSCRTSQFV NSNYLAWYQQ TPGQAPRLLI YGASSRATGI | 60 |
| PDRFSGTGYG TDFTLTISRL EPEDYGTYYC QQSSRTPWTF GQGTRVEIK | 109 |
| M206-F09 HC | |
| EVQLLESGGG LVQPGGSLRL SCAASGFTFS VYMMSWVRQA PGKGLEWVSS IVPSGGSTTY | 60 |
| ADSVKGRFTI SRDNSKNTLY LQMNSLRAED TAVYYCARVA RGIAARSRTS YFDYWGQGTL | 120 |
| VTVSSASTKG PSVFPLAPSS KS | 142 |
| M206-H01 LC | |
| QDIQMTQSPG TLSLSPGERA TLSCRTSQFV NSNYLAWYQQ TPGQAPRLLI YGASSRATGI | 60 |
| PDRFSGTGYG TDFTLTISRL EPEDYGTYYC QQSSRTPWTF GQGTRVEIK | 109 |
| M206-H01 HC | |
| EVQLLESGGG LVQPGGSLRL SCAASGFTFS EYMMVWVRQA PGKGLEWVSR ISPSGGTTEY | 60 |
| ADSVKGRFTI SRDNSKNTLY LQMNSLRAED TAVYYCARVA RGIAARSRTS YFDYWGQGTL | 120 |
| VTVSSASTKG PSVFPLAPSS KS | 142 |
| M206-H04 LC | |
| QDIQMTQSPG TLSLSPGERA TLSCRTSQFV NSNYLAWYQQ TPGQAPRLLI YGASSRATGI | 60 |
| PDRFSGTGYG TDFTLTISRL EPEDYGTYYC QQSSRTPWTF GQGTRVEIK | 109 |
| M206-H04 HC | |
| EVQLLESGGG LVQPGGSLRL SCAASGFTFS SYMMVWVRQA PGKGLEWVSS ISPSGGYTIq | 60 |
| ADSVKGRFTI SRDNSKNTLY LQMNSLRAED TAVYYCARVA RGIAARSRTS YFDYWGQGTL | 120 |
| VTVSSASTKG PSVFPLAPSS KS | 142 |
| M206-H05 LC | |
| QDIQMTQSPG TLSLSPGERA TLSCRTSQFV NSNYLAWYQQ TPGQAPRLLI YGASSRATGI | 60 |
| PDRFSGTGYG TDFTLTISRL EPEDYGTYYC QQSSRTPWTF GQGTRVEIK | 109 |
| M206-H05 HC | |
| EVQLLESGGG LVQPGGSLRL SCAASGFTFS GYKMqWVRQA PGKGLEWVSS ISPSGGITMY | 60 |
| ADSVKGRFTI SRDNSKNTLY LQMNSLRAED TAVYYCARVA RGIAARSRTS YFDYWGQGTL | 120 |
| VTVSSASTKG PSVFPLAPSS KS | 142 |
| M206-H08 LC | |
| QDIQMTQSPG TLSLSPGERA TLSCRTSQFV NSNYLAWYQQ TPGQAPRLLI YGASSRATGI | 60 |
| PDRFSGTGYG TDFTLTISRL EPEDYGTYYC QQSSRTPWTF GQGTRVEIK | 109 |
| M206-H08 HC | |
| EVQLLESGGG LVQPGGSLRL SCAASGFTFS DYMMAWVRQA PGKGLEWVSS IVPSGGHTHY | 60 |
| ADSVKGRFTI SRDNSKNTLY LQMNSLRAED TAVYYCARVA RGIAARSRTS YFDYWGQGTL | 120 |
| VTVSSASTKG PSVFPLAPSS KS | 142 |
| M207-A01 LC | |
| QDIQMTQSPG TLSLSPGERA TLSCRTSQFV NSNYLAWYQQ TPGQAPRLLI YGASSRATGI | 60 |
| PDRFSGTGYG TDFTLTISRL EPEDYGTYYC QQSSRTPWTF GQGTRVEIK | 109 |
| M207-A01 HC | |
| EVQLLESGGG LVQPGGSLRL SCAASGFTFS HYLMTWVRQA PGKGLEWVSY ISPSGGHTIY | 60 |
| ADSVKGRFTI SRDNSKNTLY LQMNSLRAED TAVYYCARVA RGISARSRTS CFDYWGQGTL | 120 |
| VTVSSASTKG PSVFPLAPSS KS | 142 |
| M207-A02 LC | |
| QDIQMTQSPG TLSLSPGERA TLSCRTSQFV NSNYLAWYQQ TPGQAPRLLI YGASSRATGI | 60 |
| PDRFSGTGYG TDFTLTISRL EPEDYGTYYC QQSSRTPWTF GQGTRVEIK | 109 |
| M207-A02 HC | |
| EVQLLESGGG LVQPGGSLRL SCAASGFTFS HYLMTWVRQA PGKGLEWVSY ISPSGGHTIY | 60 |
| ADSVKGRFTI SRDNSKNTLY LQMNSLRAED TALYYCARVA RGIAARSRTI NLDYWGQGTL | 120 |
| VTVSSASTKG PSVFPLAPSS KS | 142 |
| M207-A04 LC | |
| QDIQMTQSPG TLSLSPGERA TLSCRTSQFV NSNYLAWYQQ TPGQAPRLLI YGASSRATGI | 60 |
| PDRFSGTGYG TDFTLTISRL EPEDYGTYYC QQSSRTPWTF GQGTRVEIK | 109 |
| M207-A04 HC | |
| EVQLLESGGG LVQPGGSLRL SCAASGFTFS HYLMTWVRQA PGKGLEWVSY ISPSGGHTIY | 60 |
| ADSVKGRFTI SRDNSKNTLY LQMNSLRAED TAVYYCARVA RGIAARSRTR SFDYWGQGTL | 120 |
| VTVSSASTKG PSVFPLAPSS KS | 142 |
| M207-C05 LC | |
| QDIQMTQSPG TLSLSPGERA TLSCRTSQFV NSNYLAWYQQ TPGQAPRLLI YGASSRATGI | 60 |
| PDRFSGTGYG TDFTLTISRL EPEDYGTYYC QQSSRTPWTF GQGTRVEIK | 109 |
| R0121-D02 = M0207-C05 HC | |
| EVQLLESGGG LVQPGGSLRL SCAASGFTFS HYLMTWVRQA PGKGLEWVSY ISPSGGHTIY | 60 |
| ADSVKGRFTI SRDNSKNTLY LQMNSLRAED TAVYYCARVG RGIAARSRTS YFDKWGQGTL | 120 |
| VTVSSASTKG PSVFPLAPSS KS | 142 |
| M208-A10 LC | |
| QDIQMTQSPG TLSLSPGERA TLSCRTSQFV NSNYLAWYQQ TPGQAPRLLI YGASSRATGI | 60 |
| PDRFSGTGYG TDFTLTISRL EPEDYGTYYC QQSSRTPWTF GQGTRVEIK | 109 |
| M208-A10 HC | |
| EVQLLESGGG LVQPGGSLRL SCAASGFTFS HYLMTWVRQA PGKGLEWVSY ISPSGGHTIY | 60 |
| ADSVKGRFTI SRDNSKNTLY LQMNSLRAED TAVYYCARVA RGIAARSRTS qFDHWGQGTL | 120 |
| VTVSSASTKG PSVFPLAPSS KS | 142 |
| M208-B01 LC | |
| QDIQMTQSPG TLSLSPGERA TLSCRTSQFV NSNYLAWYQQ TPGQAPRLLI YGASSRATGI | 60 |
| PDRFSGTGYG TDFTLTISRL EPEDYGTYYC QQSSRTPWTF GQGTRVEIK | 109 |
| M208-B01 HC | |
| EVQLLESGGG LVQPGGSLRL SCAASGFTFS HYLMTWVRQA PGKGLEWVSY ISPSGGHTIY | 60 |
| ADSVKGRFTI SRDNSKNTLY LQMNSLRAED TAVYYCARVA RGIAARSRTS FFDqWGQGTL | 120 |
| VTVSSASTKG PSVFPLAPSS KS | 142 |
| M208-C06 LC | |
| QDIQMTQSPG TLSLSPGERA TLSCRTSQFV NSNYLAWYQQ TPGQAPRLLI YGASSRATGI | 60 |
| PDRFSGTGYG TDFTLTISRL EPEDYGTYYC QQSSRTPWTF GQGTRVEIK | 109 |
| M208-C06 HC | |
| EVQLLESGGG LVQPGGSLRL SCAASGFTFS HYLMTWVRQA PGKGLEWVSY ISPSGGHTIY | 60 |
| ADSVKGRFTI SRDNSKNTLY LQMNSLRAED AVYYCARVA RGIAARSRTS FIDYWGQGTL | 120 |
| VTVSSASTKG PSVFPLAPSS KS | 142 |
| M208-D12 LC | |
| QDIQMTQSPG TLSLSPGERA TLSCRTSQFV NSNYLAWYQQ TPGQAPRLLI YGASSRATGI | 60 |
| PDRFSGTGYG TDFTLTISRL EPEDYGTYYC QQSSRTPWTF GQGTRVEIK | 109 |
| M208-D12 HC | |
| EVQLLESGGG LVQPGGSLRLSCAASGFTFS HYLMTWVRQA PGKGLEWVSY ISPSGGHTIY | 60 |
| ADSVKGRFTI SRDNSKNTLY LQMNSLRAED TAVYYCARLA RGIAARSRTS YqDIWGQGTL | 120 |
| VTVSSASTKG PSVFPLAPSS KS | 142 |
| M208-E10 LC | |
| QDIQMTQSPG TLSLSPGERA NTLSCRTSQFV SNYLAWYQQ TPGQAPRLLI YGASSRATGI | 60 |
| PDRFSGTGYG TDFTLTISRL EPEDYGTYYCQ QSSRTPWTF GQGTRVEIK | 109 |
| M208-E10 HC | |
| EVQLLESGGG LVQPGGSLRL SCAASGFTFS HYLMTWVRQA PGKGLEWVSY ISPSGGHTIY | 60 |
| ADSVKGRFTI SRDNSKNTLY LQMNSLRAEDTAVYYCARVA QGISARSRTS YFDYWGQGTL | 120 |
| VTVSSASTKG PSVFPLAPSS KS | 142 |
| M208-F04 LC | |
| QDIQMTQSPG TLSLSPGERA TLSCRTSQFV NSNYLAWYQQ TPGQAPRLLI YGASSRATGI | 60 |
| PDRFSGTGYG TDFTLTISRL EPEDYGTYYC QQSSRTPWTF GQGTRVEIK | 109 |
| M208-F04 HC | |
| EVQLLESGGG LVQPGGSLRL SCAASGFTFS HYLMTWVRQA PGKGLEWVSY ISPSGGHTIY | 60 |
| ADSVKGRFTI SRDNSKNTLY LQMNSLRAED TAVYYCARVA RGIAARSRTS FFDYWGQGTL | 120 |
| VTVSSASTKG PSVFPLAPSS KS | 142 |
| M208-F10 LC | |
| QDIQMTQSPG TLSLSPGERA TLSCRTSQFV NSNYLAWYQQ TPGQAPRLLI YGASSRATGI | 60 |
| PDRFSGTGYG TDFTLTISRL EPEDYGTYYC QQSSRTPWTF GQGTRVEIK | 109 |
| M208-F10 HC | |
| EVQLLESGGG LVQPGGSLRL SCAASGFTFS HYLMTWVRQA PGKGLEWVSY ISPSGGHTIY | 60 |
| ADSVKGRFTI SRDNSKNTLY LQMNSLRAED TAVYYCARVA RGIAARSRTS YFDqWGQGTL | 120 |
| VTVSSASTKG PSVFPLAPSS KS | 142 |
| M208-G02 LC | |
| QDIQMTQSPG TLSLSPGERA TLSCRTSQFV NSNYLAWYQQ TPGQAPRLLI YGASSRATGI | 60 |
| PDRFSGTGYG TDFTLTISRL EPEDYGTYYC QQSSRTPWTF GQGTRVEIK | 109 |
| M208-G02 HC | |
| EVQLLESGGG LVQPGGSLRL SCAASGFTFS HYLMTWVRQA PGKGLEWVSY ISPSGGHTIY | 60 |
| ADSVKGRFTI SRDNSKNTLY LQMNSLRAED TAVYYCARVA RGIADRSRTS YSDYWGQGTL | 120 |
| VTVSSASTKG PSVFPLAPSS KS | 142 |
| M208-G03 LC | |
| QDIQMTQSPG TLSLSPGERA TLSCRTSQFV NSNYLAWYQQ TPGQAPRLLI YGASSRATGI | 60 |
| PDRFSGTGYG TDFTLTISRL EPEDYGTYYC QQSSRTPWTF GQGTRVEIK | 109 |
| M208-G03 HC | |
| EVQLLESGGG LVQPGGSLRL SCAASGFTFS HYLMTWVRQA PGKGLEWVSY ISPSGGHTIY | 60 |
| ADSVKGRFTI SRDNSKNTLY LQMNSLRAED TAVYYCARVA RGIAARSRTS YLDYWGQGTL | 120 |
| VTVSSASTKG PSVFPLAPSS KS | 142 |
| M208-H02 LC | |
| QDIQMTQSPG TLSLSPGERA TLSCRTSQFV NSNYLAWYQQ TPGQAPRLLI YGASSRATGI | 60 |
| PDRFSGTGYG TDFTLTISRL EPEDYGTYYC QQSSRTPWTF GQGTRVEIK | 109 |
| M208-H02 HC | |
| EVQLLESGGG LVQPGGSLRL SCAASGFTFS HYLMTWVRQA PGKGLEWVSY ISPSGGHTIY | 60 |
| ADSVKGRFTI SRDNSKNTLY LQMNSLRAED TAVYYCARVA RGIASRSRTR YCDYWGQGTL | 120 |
| VTVSSASTKG PSVFPLAPSS KS | 142 |
| M209-B01 LC | |
| QDIQMTQSPG TLSLSPGERA TLSCRTSQFV NSNYLAWYQQ TPGQAPRLLI YGASSRATGI | 60 |
| PDRFSGTGYG TDFTLTISRL EPEDYGTYYC QQSSRTPWTF GQGTRVEIK | 109 |
| M209-B01 HC | |
| EVQLLESGGG LVQPGGSLRL SCAASGFTFS HYLMTWVRQA PGKGLEWVSY ISPSGGHTIY | 60 |
| ADSVKGRFTI SRDNSKNTLY LQMNSLRAEDTAVYYCARVA RGIVARSRTS NFDqWGQGTL | 120 |
| VTVSSASTKG PSVFPLAPSS KS | 142 |
| M209-B09 LC | |
| QDIQMTQSPG TLSLSPGERA TLSCRTSQFV NSNYLAWYQQ TPGQAPRLLI YGASSRATGI | 60 |
| PDRFSGTGYG TDFTLTISRL EPEDYGTYYC QQSSRTPWTF GQGTRVEIK | 109 |
| M209-B09 HC | |
| EVQLLESGGG LVQPGGSLRL SCAASGFTFS HYLMTWVRQA PGKGLEWVSY ISPSGGHTIY | 60 |
| ADSVKGRFTI SRDNSKNTLY LQMNSLRAED TAVYYCARVA QGIVARSRTS YLHqWGQGTL | 120 |
| VTVSSASTKG PSVFPLAPSS KS | 142 |
| M209-B11 LC | |
| QDIQMTQSPG TLSLSPGERA TLSCRTSQFV NSNYLAWYQQ TPGQAPRLLI YGASSRATGI | 60 |
| PDRFSGTGYG TDFTLTISRL EPEDYGTYYC QQSSRTPWTF GQGTRVEIK | 109 |
| M209-B11 HC | |
| EVQLLESGGG LVQPGGSLRL SCAASGFTFS HYLMTWVRQA PGKGLEWVSY ISPSGGHTIY | 60 |
| ADSVKGRFTI SRDNSKNTLY LQMNSLRAED TAVYYCARVA RGIAARSRTR YIDqWGQGTL | 120 |
| VTVSSASTKG PSVFPLAPSS KS | 142 |
| M209-C02 LC | |
| QDIQMTQSPG TLSLSPGERA TLSCRTSQFV NSNYLAWYQQ TPGQAPRLLI YGASSRATGI | 60 |
| PDRFSGTGYG TDFTLTISRL EPEDYGTYYC QQSSRTPWTF GQGTRVEIK | 109 |
| M209-C02 HC | |
| EVQLLESGGG LVQPGGSLRL SCAASGFTFS HYLMTWVRQA PGKGLEWVSY ISPSGGHTIY | 60 |
| ADSVKGRFTI SRDNSKNTLY LQMNSLRAED TAVYYCARVA RGIAYRRRTS YFDYWGQGTL | 120 |
| VTVSSASTKG PSVFPLAPSS KS | 142 |
| M209-C11 LC | |
| QDIQMTQSPG TLSLSPGERA TLSCRTSQFV NSNYLAWYQQ TPGQAPRLLI YGASSRATGI | 60 |
| PDRFSGTGYG TDFTLTISRL EPEDYGTYYC QQSSRTPWTF GQGTRVEIK | 109 |
| M209-C11 HC | |
| EVQLLESGGG LVQPGGSLRL SCAASGFTFS HYLMTWVRQA PGKGLEWVSY ISPSGGHTIY | 60 |
| ADSVKGRFTI SRDNSKNTLY LQMNSLRAED TAVYYCAMVG QGIRGRSRTS YFAqWGQGTL | 120 |
| VTVSSASTKG PSVFPLAPSS KS | 142 |
| M209-C12 LC | |
| QDIQMTQSPG TLSLSPGERA TLSCRTSQFV NSNYLAWYQQ TPGQAPRLLI YGASSRATGI | 60 |
| PDRFSGTGYG TDFTLTISRL EPEDYGTYYC QQSSRTPWTF GQGTRVEIK | 109 |
| M209-C12 HC | |
| EVQLLESGGG LVQPGGSLRL SCAASGFTFS HYLMTWVRQA PGKGLEWVSY ISPSGGHTIY | 60 |
| ADSVKGRFTI SRDNSKNTLY LQMNSLRAEDTAVYYCARVG RGIAARSRTS qLDYWGQGTL | 120 |
| VTVSSASTKG PSVFPLAPSS KS | 142 |
| M209-D02 LC | |
| QDIQMTQSPG TLSLSPGERA TLSCRTSQFV NSNYLAWYQQ TPGQAPRLLI YGASSRATGI | 60 |
| PDRFSGTGYG TDFTLTISRL EPEDYGTYYC QQSSRTPWTF GQGTRVEIK | 109 |
| M209-D02 HC | |
| EVQLLESGGG LVQPGGSLRL SCAASGFTFS HYLMTWVRQA PGKGLEWVSY ISPSGGHTIY | 60 |
| ADSVKGRFTI SRDNSKNTLY LQMNSLRAEDT AVYYCARVA RGITARSRTS YFDDWGQGTL | 120 |
| VTVSSASTKG PSVFPLAPSS KS | 142 |
| M209-D03 LC | |
| QDIQMTQSPG TLSLSPGERA TLSCRTSQFV NSNYLAWYQQ TPGQAPRLLI YGASSRATGI | 60 |
| PDRFSGTGYG TDFTLTISRL EPEDYGTYYC QQSSRTPWTF GQGTRVEIK | 109 |
| M209-D03 HC | |
| EVQLLESGGG LVQPGGSLRL SCAASGFTFS HYLMTWVRQA PGKGLEWVSY ISPSGGHTIY | 60 |
| ADSVKGRFTI SRDNSKNTLY LQMNSLRAED TAVYYCARVG RGIAARSRTS FFDqWGQGTL | 120 |
| VTVSSASTKG PSVFPLAPSS KS | 142 |
| M209-D12 LC | |
| QDIQMTQSPG TLSLSPGERA TLSCRTSQFV NSNYLAWYQQ TPGQAPRLLI YGASSRATGI | 60 |
| PDRFSGTGYG TDFTLTISRL EPEDYGTYYC QQSSRTPWTF GQGTRVEIK | 109 |
| M209-D12 HC | |
| EVQLLESGGG LVQPGGSLRL SCAASGFTFS HYLMTWVRQA PGKGLEWVSY ISPSGGHTIY | 60 |
| ADSVKGRFTI SRDNSKNTLY LQMNSLRAED TAVYYCATVA RGIAARSRTS YFDqWGQGTL | 120 |
| VTVSSASTKG PSVFPLAPSS KS | 142 |
| M209-E02 LC | |
| QDIQMTQSPG TLSLSPGERA TLSCRTSQFV NSNYLAWYQQ TPGQAPRLLI YGASSRATGI | 60 |
| PDRFSGTGYG TDFTLTISRL EPEDYGTYYC QQSSRTPWTF GQGTRVEIK | 109 |
| M209-E02 HC | |
| EVQLLESGGG LVQPGGSLRL SCAASGFTFS HYLMTWVRQA PGKGLEWVSY ISPSGGHTIY | 60 |
| ADSVKGRFTI SRDNSKNTLY LQMNSLRAED TAVYYCARVA RGIAARSRTI LLDqWGQGTL | 120 |
| VTVSSASTKG PSVFPLAPSS KS | 142 |
| M209-E03 LC | |
| QDIQMTQSPG TLSLSPGERA TLSCRTSQFV NSNYLAWYQQ TPGQAPRLLI YGASSRATGI | 60 |
| PDRFSGTGYG TDFTLTISRL EPEDYGTYYC QQSSRTPWTF GQGTRVEIK | 109 |
| M209-E03 HC | |
| EVQLLESGGG LVQPGGSLRL SCAASGFTFS HYLMTWVRQA PGKGLEWVSY ISPSGGHTIY | 60 |
| ADSVKGRFTI SRDNSKNTLY LQMNSLRAED TAVYYCARqA RGIAARSRTS YFDYWGQGTL | 120 |
| VTVSSASTKG PSVFPLAPSS KS | 142 |
| M209-F04 LC | |
| QDIQMTQSPG TLSLSPGERA TLSCRTSQFV NSNYLAWYQQ TPGQAPRLLI YGASSRATGI | 60 |
| PDRFSGTGYG TDFTLTISRL EPEDYGTYYC QQSSRTPWTF GQGTRVEIK | 109 |
| M209-F04 HC | |
| EVQLLESGGG LVQPGGSLRL SCAASGFTFS HYLMTWVRQA PGKGLEWVSY ISPSGGHTIY | 60 |
| ADSVKGRFTI SRDNSKNTLY LQMNSLRAED TAVYYCARVA RGIAARSRTS YLDqWSQGTL | 120 |
| VTVSSASTKG PSVFPLAPSS KS | 142 |
| M209-G01 LC | |
| QDIQMTQSPG TLSLSPGERA TLSCRTSQFV NSNYLAWYQQ TPGQAPRLLI YGASSRATGI | 60 |
| PDRFSGTGYG TDFTLTISRL EPEDYGTYYC QQSSRTPWTF GQGTRVEIK | 109 |
| M209-G01 HC | |
| EVQLLESGGG LVQPGGSLRL SCAASGFTFS HYLMTWVRQA PGKGLEWVSY ISPSGGHTIY | 60 |
| ADSVKGRFTI SRDNSKNTLY LQMNSLRAED TAVYYCARVA qGISGRSRLS YVDYWGQGTL | 120 |
| VTVSSASTKG PSVFPLAPSS KS | 142 |
| M209-G07 LC | |
| QDIQMTQSPG TLSLSPGERA TLSCRTSQFV NSNYLAWYQQ TPGQAPRLLI YGASSRATGI | 60 |
| PDRFSGTGYG TDFTLTISRL EPEDYGTYYC QQSSRTPWTF GQGTRVEIK | 109 |
| M209-G07 HC | |
| EVQLLESGGG LVQPGGSLRL SCAASGFTFS HYLMTWVRQA PGKGLEWVSY ISPSGGHTIY | 60 |
| ADSVKGRFTI SRDNSKNTLY LQMNSLRAED TAVYYCARVA RGIAARSRTS YFDTWGQGTL | 120 |
| VTVSSASTKG PSVFPLAPSS KS | 142 |
| M209-H03 LC | |
| QDIQMTQSPG TLSLSPGERA TLSCRTSQFV NSNYLAWYQQ TPGQAPRLLI YGASSRATGI | 60 |
| PDRFSGTGYG TDFTLTISRL EPEDYGTYYC QQSSRTPWTF GQGTRVEIK | 109 |
| M209-H03 HC | |
| EVQLLESGGG LVQPGGSLRL SCAASGFTFS HYLMTWVRQA PGKGLEWVSY ISPSGGHTIY | 60 |
| ADSVKGRFTI SRDNSKNTLY LQMNSLRAED TAVYYCARVA QGIAARSRTT qFDYWGQGTL | 120 |
| VTVSSASTKG PSVFPLAPSS KS | 142 |
| M209-H07 LC | |
| QDIQMTQSPG TLSLSPGERA TLSCRTSQFV NSNYLAWYQQ TPGQAPRLLI YGASSRATGI | 60 |
| PDRFSGTGYG TDFTLTISRL EPEDYGTYYC QQSSRTPWTF GQGTRVEIK | 109 |
| M209-H07 HC | |
| EVQLLESGGG LVQPGGSLRL SCAASGFTFS HYLMTWVRQA PGKGLEWVSY ISPSGGHTIY | 60 |
| ADSVKGRFTI SRDNSKNTLY LQMNSLRAED TAVYYCARVA RGIAARqRTS YYDYWGQGTL | 120 |
| VTVSSASTKG PSVFPLAPSS KS | 142 |
| M209-H09 LC | |
| QDIQMTQSPG TLSLSPGERA TLSCRTSQFV NSNYLAWYQQ TPGQAPRLLI YGASSRATGI | 60 |
| PDRFSGTGYG TDFTLTISRL EPEDYGTYYC QQSSRTPWTF GQGTRVEIK | 109 |
| M209-H09 HC | |
| EVQLLESGGG LVQPGGSLRL SCAASGFTFS HYLMTWVRQA PGKGLEWVSY ISPSGGHTIY | 60 |
| ADSVKGRFTI SRDNSKNTLY LQMNSLRAED TAVYYCARVA RGIAARSRTV YFDHWGQGTL | 120 |
| VTVSSASTKG PSVFPLAPSS KS | 142 |
| M210-A06 LC | |
| QDIQMTQSPG TLSLSPGERA TLSCRTSQFV NSNYLAWYQQ TPGQAPRLLI YGASSRATGI | 60 |
| PDRFSGTGYG TDFTLTISRL EPEDYGTYYC QQSSRTPWTF GQGTRVEIK | 109 |
| M210-A06 HC | |
| EVQLLESGGG LVQPGGSLRL SCAASGFTFS HYLMTWVRQA PGKGLEWVSY ISPSGGHTIY | 60 |
| ADSVKGRFTI SRDNSKNTLY LQMNSLRAED TAVYYCARVA RGIAARSRTS qFDYWGQGTL | 120 |
| VTVSSASTKG PSVFPLAPSS KS | 142 |
| M210-B02 LC | |
| QDIQMTQSPG TLSLSPGERA TLSCRTSQFV NSNYLAWYQQ TPGQAPRLLI YGASSRATGI | 60 |
| PDRFSGTGYG TDFTLTISRL EPEDYGTYYC QQSSRTPWTF GQGTRVEIK | 109 |
| M210-B02 HC | |
| EVQLLESGGG LVQPGGSLRL SCAASGFTFS HYLMTWVRQA PGKGLEWVSY ISPSGGHTIY | 60 |
| ADSVKGRFTI SRDNSKNTLY LQMNSLRAED TAVYYCASVA RGIAARSRTS YFNqWGQGTL | 120 |
| VTVSSASTKG PSVFPLAPSS KS | 142 |
| M210-C12 LC | |
| QDIQMTQSPG TLSLSPGERA TLSCRTSQFV NSNYLAWYQQ TPGQAPRLLI YGASSRATGI | 60 |
| PDRFSGTGYG TDFTLTISRL QEPEDYGTYY CQSSRTPWTF GQGTRVEIK | 109 |
| M210-C12 HC | |
| EVQLLESGGG LVQPGGSLRL SCAASGFTFS HYLMTWVRQA PGKGLEWVSY ISPSGGHTIY | 60 |
| ADSVKGRFTI SRDNSKNTLY LQMNSLRAED TAVYYCARVA QGIAARSRTS SVDqWGQGTL | 120 |
| VTVSSASTKG PSVFPLAPSS KS | 142 |
| M210-G04 LC | |
| QDIQMTQSPG TLSLSPGERA TLSCRTSQFV NSNYLAWYQQ TPGQAPRLLI YGASSRATGI | 60 |
| PDRFSGTGYG TDFTLTISRL EPEDYGTYYC QSSRTPWTF GQGTRVEIK | 109 |
| M210-G04 HC | |
| EVQLLESGGG LVQPGGSLRL SCAASGFTFS HYLMTWVRQA PGKGLEWVSY ISPSGGHTIY | 60 |
| ADSVKGRFTI SRDNSKNTLY LQMNSLRAED TAVYYCARVA TGIVARSRTR YFDqWGQGTL | 120 |
| VTVSSASTKG PSVFPLAPSS KS | 142 |
| M210-G10 LC | |
| QDIQMTQSPG TLSLSPGERA TLSCRTSQFV NSNYLAWYQQ TPGQAPRLLI YGASSRATGI | 60 |
| PDRFSGTGYG TDFTLTISRL EPEDYGTYYC QQSSRTPWTF GQGTRVEIK | 109 |
| M210-G10 HC | |
| EVQLLESGGG LVQPGGSLRL SCAASGFTFS HYLMTWVRQA PGKGLEWVSY ISPSGGHTIY | 60 |
| ADSVKGRFTI SRDNSKNTLY LQMNSLRAED TAVYYCARVA RGIAARSRTS YLDFWGQGTL | 120 |
| VTVSSASTKG PSVFPLAPSS KS | 142 |
| M210-H01 LC | |
| QDIQMTQSPG TLSLSPGERA TLSCRTSQFV NSNYLAWYQQ TPGQAPRLLI YGASSRATGI | 60 |
| PDRFSGTGYG TDFTLTISRL EPEDYGTYYC QQSSRTPWTF GQGTRVEIK | 109 |
| M210-H01 HC | |
| EVQLLESGGG LVQPGGSLRL SCAASGFTFS HYLMTWVRQA PGKGLEWVSY ISPSGGHTIY | 60 |
| ADSVKGRFTI SRDNSKNTLY LQMNSLRAED TAVYYCARVA RGIAARSRNS qQDYWGQGTL | 120 |
| VTVSSASTKG PSVFPLAPSS KS | 142 |
| M210-H06 LC | |
| QDIQMTQSPG TLSLSPGERA TLSCRTSQFV NSNYLAWYQQ TPGQAPRLLI YGASSRATGI | 60 |
| PDRFSGTGYG TDFTLTISRL EPEDYGTYYC QQSSRTPWTF GQGTRVEIK | 109 |
| M210-H06 HC | |
| EVQLLESGGG LVQPGGSLRL SCAASGFTFS HYLMTWVRQA PGKGLEWVSY ISPSGGHTIY | 60 |
| ADSVKGRFTI SRDNSKNTLY LQMNSLRAED TAVYYCARVA RGIAARSRTR YFDYWGQGTL | 120 |
| VTVSSASTKG PSVFPLAPSS KS | 142 |
| M210-H07 LC | |
| QDIQMTQSPG TLSLSPGERA TLSCRTSQFV NSNYLAWYQQ TPGQAPRLLI YGASSRATGI | 60 |
| PDRFSGTGYG TDFTLTISRL EPEDYGTYYC QQSSRTPWTF GQGTRVEIK | 109 |
| M210-H07 HC | |
| EVQLLESGGG LVQPGGSLRL SCAASGFTFS HYLMTWVRQA PGKGLEWVSY ISPSGGHTIY | 60 |
| ADSVKGRFTI SRDNSKNTLY LQMNSLRAED TAVYYCARVA RGIAARSRTR YFDqWGQGTL | 120 |
| VTVSSASTKG PSVFPLAPSS KS | 142 |

### Example 6: In Vivo Testing of M162-A04 (IgG) and X101-A01

[0949] Bradykinin and other bioactive kinins have been previously implicated in carrageenan-induced edema and inflammatory pain (Sharma J. N. et al. (1998) Inflammopharmacology 6, 9-17; Asano M. et al. (1997) Br J Pharmacol 122, 1436-1440; De Campos R. O. et al. (1996) Eur J Pharmacol 316, 277-286). Plasma kallikrein and tissue kallikrein 1 are the two primary kininogenases in mammals (Schmaier A. H. (2008) Int Immunopharmacol 8, 161-165). M162-A04 (M162-A4) (IgG), a specific plasma kallikrein inhibitor, was tested to determine whether it would be effective in carrageenan induced edema. The study design is outlined in Table 10. The route of administration (ROA) for the vehicle (PBS), the antibody, and the positive control (indomethacin) was intra-peritoneal (IP) and was given 30 minutes prior to carrageenan injection (0.1 mL of a 2% carrageenan solution). It is evident from FIG. 2 that antibody doses at 10 mg/kg and above were equally effective in reducing carrageenan-induced edema as the positive control (indomethacin). However, the antibody was not effective in reducing carrageenan-induced thermal hyperalgesia (FIG. 3). The reason for the dissociation between effectiveness in edema and hyperalgesia are not obvious but may be due to differences in the bioactivity of different kinin metabolites. Lys-desArg9-bradykinin is the most potent agonist of the B1 receptor, which is believed to be primarily involved in pain hypersensitivity (Leeb-Lundberg L. M et al. (2005) Pharmacol Rev 57, 27-77). This kinin metabolite is generated by tissue kallikrein 1, not plasma kallikrein (Schmaier A. H. (2008) Int Immunopharmacol 8,161-165). This difference in kinin generation and resulting bradykinin receptor activation may account for the unexpected decoupling of edema and hyperalgesia in this model.

[0950] Another pKal antibody inhibitor X101-A01 was also tested in the CPE model using the study design shown in Table 10B. The data obtained in FIG. 14 shows that X101-A01 inhibited edema in a dose-dependent manner to an extent that is comparable to that of the positive control (indomethacin).

TABLE 10A
Carrageenan-Induced Paw Edema Study Design to test M162-A04

| | | | | | Timing | Dose |
|---|---|---|---|---|---|---|
| | Number | | Dose | | relative to | Volume |
| Group # | of Rats | Treatment | (mg/kg) | ROA | carrageenan | (mL/kg) |
| 1 | 6 | Vehicle | N/A | IP | T − 30 | 20 |
| | | | | | minutes | |
| 2 | 6 | 559A-M162-A4 | 3 | IP | T − 30 | 20 |
| | | | | | minutes | |
| 3 | 6 | 559A-M162-A4 | 10 | IP | T − 30 | 20 |
| | | | | | minutes | |
| 4 | 6 | 559A-M162-A4 | 30 | IP | T − 30 | 20 |
| | | | | | minutes | |
| 5 | 6 | Indomethacin | 5 | IP | T − 30 | 20 |
| | | | | | minutes | |

TABLE 10B
Carrageenan-Induced Paw Edema Study Design to Test X101-A01

| | | | Dose | | | Vol |
|---|---|---|---|---|---|---|
| Group | Treatment | n | (mg/Kg) | ROA | Timing * | (mL/Kg) |
| 1 | Vehicle | 10 | N/A | IP | −30 min | 20 |
| 2 | X101-A01 | 10 | 1 | IP | −30 min | 20 |
| 3 | X101-A01 | 10 | 3 | IP | −30 min | 20 |
| 4 | X101-A01 | 10 | 10 | IP | −30 min | 20 |
| 5 | X101-A01 | 10 | 30 | IP | −30 min | 20 |
| 6 | Indomethacin | 10 | 5 | IP | −30 min | 20 |

### Example 7: Evaluation of Selected Antibody Inhibitors of Plasma Kallikrein

[0951] Evaluation of selected optimized antibodies (X81-B01 and X67-D03) is shown in Table 11. Neither antibody has any putative deamidation, isomerization, or oxidation sites.

TABLE 11

| Criteria | X81-B01 (IgG) | X67-D03 (IgG) |
|---|---|---|
| <nM Ki,app against human pKal | 0.2 nM | 0.1 nM |
| <nM Ki,app against rodent pKal | mouse-11 pM | mouse-0.7 nM |
| | rat-0.14 nM | rat-0.34 nM |
| prekallikrein binding | no | no |
| Specific inhibitor with respect to fXIa, | yes | yes |
| plasmin, and trypsin | | |
| Inhibits bradykinin generation | yes | yes |
| Inhibits pKal in presence of prekallikrein | yes | yes |
| Competition for binding with aprotinin | yes | yes |
| Stability in human serum | yes | nd* |

*not done; a parental form of this antibody was shown to be stable in serum

### Example 8: Epitope Mapping

[0952] The region of pKal bound by selected anti-pKal antibodies was investigated using several methods. First, competition assays were used to determine whether the antibodies competed for binding to pKal with known active site-directed inhibitors. Second, antibodies were grouped according to whether they were inhibitors or just binders to pKal. Third, epitopes were investigated using synthetic peptides and peptidic structures based on the sequence and 3-dimensional structure of pKal. These peptidic structures are called “CLIPS” (Chemically Linked Peptides on Scaffolds) and the testing was performed by a fee for service company called Pepscan.

[0953] Fourth, antibodies were tested for their ability to inhibit pKal from other species, besides human, where the amino acid sequence of pKal has been determined in order to identify amino acids that may account for the differences in inhibition.

### Competition Assays

[0954] Using a BIACORE® SPR assay antibodies of interest were tested for competition with a known active site inhibitor of pKal. EPI-KAL2 is potent (K_{i,app}=0.1 nM) active site inhibitor of pKal and a Kunitz domain inhibitor based on the first domain of tissue factor pathway inhibitor (Markland (1996) Iterative optimization of high-affinity protease inhibitors using phage display. 2. Plasma kallikrein and thrombin. Biochemistry. 35(24): 8058-67). Kunitz domains are known active site inhibitors of serine proteases, such as pKal.

[0955] The sequence of EPI-KAL2 is:

EAMHSFCAFKADDGPCRAAHPRWFFNIFTRQCEEFSYGGCGGNQNRFE
SLEECKKMCTRD
(amino acids in italics are those that differ from TFPI)

[0956] As shown in FIGS. 8A-8B, the antibodies X81-B01 and X67-D03 were competed for binding to pKal in the presence or EPI-KAL2. This result indicates that these antibodies either bind in vicinity of the active site or allosteric changes in the conformation of the pKal-EPI-KAL2 complex prevent antibody binding.

### Antibody Binders Vs Inhibitors

[0957] As Shown in Tables 1 and 2, all the Unique Antibodies Discovered by Phage display were characterized as being either pKal inhibitors or binders but not inhibitors. Antibodies that inhibit the activity of pKal either bind near the active site and preclude substrate interactions (competitive inhibitors) or that bind away from the active site and induce allosteric changes in the structure of the active site (noncompetitive inhibitors). Antibodies that bind but do not inhibit pKal are unlikely to bind near the active site and may bind the non-catalytic domain (i.e. the apple domain). Table 12 categorizes selected antibodies as being either inhibitors or binders of pKal. Also shown in Table 12 for the listed antibodies, is a demonstration of whether they cross-react with mouse pKal as inhibitors and whether they bind prekallikrein.

TABLE 12
Binding Properties of Selected Anti-pKal Antibodies

| | | | human | mouse | CLIPS |
|---|---|---|---|---|---|
| | | | Ki,app | Ki,app | Peptide(s) |
| Number | Antibody | Binding Category | (nM) | (nM) | Identified |
| 1 | M6-A06 | 1) Binder only | no | no | C4 |
| 2 | M6-D09 | 2) inhibitor, prekallikrein | 5.9 | 3.9 | C1, C5 |
| | | binder, inhibits mouse and | | | |
| | | human pKal | | | |
| 3 | M8-C04 | 1) Binder only | no | no | |
| 4 | M8-G09 | 1) Binder only | no | no | C1, C4, |
| | | | | | C6, C7 |
| 5 | M29-D09 | 3) inhibitor, does not bind | 0.7 | no | C1, C4, |
| | | prekallikrein, does not | | | C7 |
| | | inhibit mouse pKal | | | |
| 6 | M35-G04 | 2) inhibitor, prekallikrein | 2.9 | 8 | C1, C4 |
| | | binder, inhibits mouse and | | | |
| | | human pKal | | | |
| 7 | M145- | 3) inhibitor, does not bind | 0.79 | 800 | C1, C4 |
| | D11 | prekallikrein, weak | | | |
| | | inhibitor of mouse pKal | | | |
| 8 | M160- | 4) inhibitor of both mouse | 5 | 0.2 | C2 |
| | G12 | and human pKal, does not | | | |
| | | bind prekallikrein | | | |
| 9 | X55-F01 | 4) inhibitor of both | 0.4 | 2 | C2, C3 |
| | | mouse and human pKal, | | | |
| | | does not bind | | | |
| | | prekallikrein | | | |
| 10 | X73-H09 | 4) inhibitor, does not bind | 20 | 70 | C6 |
| | | prekallikrein, weak | | | |
| | | inhibitor of human and | | | |
| | | mouse pKal | | | |
| 11 | X81-B01 | 4) inhibitor of both mouse | 0.1 | 0.011 | C2, C3, |
| | | and human pKal, does not | | | C5, C6 |
| | | bind prekallikrein | | | |
| 12 | A2 | 5) Negative control, does | No binding | No binding | No |
| | | not bind pKal, binds | | | binding |
| | | streptavidin | | | |

C1-C7: peptides in pKal identified by CLIPS epitope mapping (see FIG. 9 and 10A-10C). C1 corresponds to positions 55-67 of the catalytic domain, C2 to positions 81-94, C3 to positions 101-108, C4 to positions 137-151, C5 to positions 162-178, C6 to positions 186-197, and C7 to positions 214-217.

### Epitope Mapping Using CLIPS

[0958] The 11 anti-pKal antibodies listed in Table 12, plus one negative control (A2) were tested for binding to 5000 different synthetic CLIPS (Chemically Linked Peptides on Scaffolds) by Pepscan as described below in the CLIP METHODS sections. This analysis led to the identification of peptide regions in pKal that are likely to be a part of the antibody epitope for each of the tested antibodies (FIG. 9).

### CLIPS Methods

[0959] The linear and CLIPS peptides were synthesized based on the amino acid sequence of the target protein using standard Fmoc-chemistry and deprotected using trifluoric acid with scavengers. The constrained peptides were synthesized on chemical scaffolds in order to reconstruct conformational epitopes, using Chemically Linked Peptides on Scaffolds (CLIPS) technology (Timmerman et al. (2007). For example, the single looped peptides were synthesized containing a dicysteine, which was cyclized by treating with alpha, alpha′-dibromoxylene and the size of the loop was varied by introducing cysteine residues at variable spacing. If other cysteines besides the newly introduced cysteines were present, they were replaced by alanine. The side-chains of the multiple cysteines in the peptides were coupled to CLIPS templates by reacting onto credit-card format polypropylene PEPSCAN cards (455 peptide formats/card) with a 0.5 mM solution of CLIPS template such as 1,3-bis(bromomethyl)benzene in ammonium bicarbonate (20 mM, pH 7.9)/acetonitrile (1:1 (v/v)). The cards were gently shaken in the solution for 30 to 60 minutes while completely covered in solution. Finally, the cards were washed extensively with excess of H₂O and sonicated in distrupt-buffer containing 1 percent SDS/0.1 percent beta-mercaptoethanol in PBS (pH 7.2) at 70° C. for 30 minutes, followed by sonication in H₂O for another 45 minutes. The binding of antibody to each peptide were tested in a PEPSCAN-based ELISA. The 455-well credit card format polypropylene cards containing the covalently linked peptides were incubated with primary antibody solution for example consisting of 1 micrograms/mL diluted in blocking solution called SQ (4% horse serum, 5% ovalbumin (w/v) in PBS/1% Tween or diluted in PBS e.g., 20% SQ) overnight. After washing, the peptides were incubated with a 1/1000 dilution of rabbit anti-human antibody peroxidase or goat-anti-human FAB peroxidase for one hour at 25° C. After washing, the peroxidase substrate 2,2′-azino-di-3-ethylbenzthiazoline sulfonate (ABTS) and 2 microlitres of 3 percent H₂O₂ were added. After one hour, the color development was measured. The color development was quantified with a charge coupled device (CCD)—camera and an image processing system (as firstly described in Slootstra et al., 1996).

### Data Calculation

### Raw Data: Optical Density (Arbitrary OD Units)

[0960] The raw data are optical values obtained by a CCD-camera. The values mostly range from 0 to 3000, a log scale similar to 1 to 3 of a standard 96-well plate ELISA-reader. First the CCD-camera makes a picture of the card before peroxidase coloring and then again a picture after the peroxidase coloring. These two pictures are subtracted from each other which results in the data which is called raw-data. This is copied into the Peplab™ database. Then the values are copied to excel and this file is labeled as raw-data file. One follow-up manipulation is allowed. Sometimes a well contains an air-bubble resulting in a false-positive value, the cards are manually inspected and any values caused by an air-bubble are scored as 0.

[0961] Normally assays are not done in replicate (only upon request client request). Replicate tests are usually very similar. In addition, the dataset of thousands of peptides contains many peptides that are similar, thus results are never based on recognition of one peptide but on families of similar peptides. If one or a few peptides do not bind, or exhibit lower binding, in a replicate experiment, a different epitope mapping is not normally attributed.
[0962] Timmerman et al. (2007). Functional reconstruction and synthetic mimicry of a conformational epitope using CLIPS™ technology. J. Mol. Recognit. 20:283-99
[0963] Slootstra et al. (1996). Structural aspects of antibody-antigen interaction revealed through small random peptide libraries, Molecular Diversity, 1, 87-96.

### Example 9: Analysis of pKal Sequences from Different Species

[0964] All available sequence of pKal were obtained from public databases and aligned using ClustalW and regions were highlighted based on solvent accessibility, contact with an active site Kunitz inhibitor, and those peptides identified by CLIPS analysis (FIGS. 10A-10C). Citrated plasma from each of these species was obtained and activated using a commercially available prekallikrein activator (from Enzyme Research Laboratories) according to the instructions of the manufacturer. Kallikrein activity was then measured in each of the samples in the presence or absence of X81-B01.

[0965] It was found that X81-B01 inhibited pKal from all the species except for pig pKal. Since the CLIPS analysis identified four peptides of pKal that X81-B01 binds to—C2 (positions 81-94), C3 (positions 101-108), C5 (positions 162-178) and C6 (positions 186-197)—differences in the pig pKal sequence that correspond to these peptides were examined to identify potential amino acids changes that account for the lack of inhibition of pig pKal by X81-B01. Peptides C2 and C3 are close in the sequence and are both highly similar in sequence among the different species. However, there is a difference at position 479. All the species except pig, frog, and dog have a serine at position 479. The frog and dog pKal sequence has an alanine and a threonine at position 479, respectively; both of which are considered conservative substitutions for a serine. In contrast, the pig pKal sequence has a leucine at position 479, which is a considerably less conservative substitution for a serine. Peptide C5 in pig pKal is highly similar to the sequences from the other species. However, at position 563, only in the pig pKal is a histidine present (bold in FIG. 10C). This position in all the other species, except frog, is a tyrosine. In the frog pKal, which is inhibited by X81-B01, this position is a threonine. Peptide C6 in pig pKal is again highly similar to the other sequences. However, only in the pig pKal sequence is position 585 a glutamate (in bold in FIG. 10C). In all the other species this position is an aspartate. This analysis may indicate potentially critical residues in pKal that interact with X81-B01.

### Example 10: In Vitro and In Vivo Assays to Assess Efficacy of a Plasma Kallikrein Binding Protein

[0966] Binding to prekallikrein vs. kallikrein: The advantage of an antibody inhibitor of pKal that does not bind prekallikrein over an antibody that binds prekallikrein can be demonstrated experimentally. For example, an in vitro experiment can be designed to compare the potency of a pKal antibody inhibitor that does not bind prekallikrein (e.g. DX-2922 or DX-2930) with one that binds prekallikrein (e.g. M6-D09) using an activated partial thromboplastin time (APTT) plasma clotting time assay. The APTT assay induces clotting in plasma by the addition of a reagent that specifically activates the contact system component of the intrinsic coagulation pathway, of which the activity of pKal is involved. It is well known in the literature that the inhibition of pKal or that a genetic deficiency in pKal leads to prolonged aPPT (see e.g., Morishita, H., et al., Thromb Res, 1994. 73(3-4): p. 193-204; Wynne Jones, D., et al., Br J Haematol, 2004. 127(2): p. 220-3). An in vitro experiment can be performed to measure the effect of spiking citrated human plasma with different concentrations of either M6-D09 or DX-2922 or DX-2930 on observed clotting times induced using commercially available APTT reagents and a coagulation analyzer (Table 13). It is expected that the observed EC50 for APTT prolongation of M6-D09 will be significantly higher than that of DX-2922 and DX-2930 due to the binding of M6-D09 to the high concentration prekallikrein (˜500 nM) in the normal plasma sample. Efficacy of the antibody inhibitor of pKal as demonstrated by prolonging APTT supports the potential therapeutic use of the antibody in treating or preventing cardiovascular disease associated with aberrant clot formation, such as may be observed in atherosclerosis, stroke, vasculitis, aneurism, and patients implanted with ventricular assist devices.

TABLE 13
Study Design to Measure Effect of Antibody
Inhibitors of pKal on APTT

| Condition | Observed Effect on APPT |
|---|---|
| No treatment, just plasma | Normal |
| Prekallikrein depleted plasma | Maximum prolongation |
| control (commercially available) | |
| M6-D09 at low concentration | Normal |
| M6-D09 at middle concentration | Normal |
| M6-D09 at high concentration | Prolonged APTT |
| DX-2922 at low concentration | Prolonged APTT |
| DX-2922 at middle concentration | Prolonged APTT |
| DX-2922 at high concentration | Maximum prolongation |

[0967] Efficacy in a rat model of edema: An in vivo experiment can also be conducted to demonstrate the increased potency of an antibody inhibitor of pKal that does not bind prekallikrein. The carrageenan-induced paw edema (CPE) model of edema in rats is a common pharmacology model. A group of rats will be treated with escalating doses of M6-D09 and DX-2922 by intraperitoneal (IP) injection prior to injecting carrageenan (e.g. 0.1 mL of a 10% w/v solution) in the paws of the rats (Table 14). It is expected that DX-2922 will be more effective in reducing the observed paw swelling than M6-D09. Efficacy of the antibody supports the therapeutic use of the antibody in various inflammatory diseases that are associated with either swelling (e.g. hereditary angioedema, stroke induced edema, brain edema) or bradykinin mediated inflammation and pain (e.g. rheumatoid arthritis, inflammatory bowel disease).

TABLE 14
Study Design to Observe Effect of Antibody Inhibitors on CPE

| | | Example Dose | |
|---|---|---|---|
| Group | Treatment | (mg/Kg) | Effect Expected |
| 1 | Vehicle | N/A | Maximum swelling |
| 2 | Indomethacin | 5 | Maximum reduction of |
| | (positive control) | | swelling |
| 3 | M6-D09 | 1 | No effect on swelling |
| 4 | M6-D09 | 3 | No effect on swelling |
| 5 | M6-D09 | 10 | Intermediate reduction of |
| | | | swelling |
| 6 | DX-2922 | 1 | No effect on swelling |
| 7 | DX-2922 | 3 | Intermediate reduction of |
| | | | swelling |
| 8 | DX-2922 | 10 | Maximum reduction of |
| | | | swelling |

[0968] An in vivo experiment was conducted to demonstrate the anti-inflammatory potentcy and efficacy of a plasma kallikrein binding protein, DX-2930 after intraperitoneal and subcutaneous injection in the CPE model of edema in rats.

[0969] A group of rats where treated with escalating doses of DX-2930 by intraperitoneal (IP) injection prior to injecting carrageenan (e.g. 0.1 mL of a 1% w/v solution) in the paws of the rats. Paw swelling was measured by plethysmography according fluid displacement using established procedures. Indomethacin, the positive control for this experiment, was administered IP at 5 mg/Kg 30 minutes prior to carrageenan injection. The dose of DX-2930 was varied from 1, 3, 10, and 30 mg/Kg. Injection of 0.1 ml 1% carrageenan into the right hind paw resulted in a maximum 2-fold increase in paw volume four hours after challenge. Pretreatment with 5 mg/kg indomethacin inhibited this response by ˜50% for the duration of the study. Intraperitoneal injection of DX-2930 thirty minutes prior to carrageenan challenge resulted in a dose-dependent inhibition of the carrageenan-induced response such that no amelioratory effect was observed at the 1 mg/kg dose, but that at the 30 mg/kg dose effects similar to indomethacin were measured.

[0970] DX-2930 was administered SC to rats 24 hours prior to the injection of a 0.1 mL 1% carrageenan solution into the right hind paw. Paw swelling was measured by plethysmography according fluid displacement using established procedures. Indomethacin, the positive control for this experiment, was administered IP at 5 mg/Kg 30 minutes prior to carrageenan injection. The dose of DX-2930 was varied from 1, 3, 10, and 30 mg/Kg. In contrast, subcutaneous injection of DX-2930 twenty-four hours prior to carrageenan challenge not only dose-dependently inhibited the carrageenan response, this treatment regimen yielded a significant improvement over indomethacin, delayed the development of the carrageenan-induced edema and significantly inhibited the carrageenan response at all doses throughout the time course of the study.

[0971] Measuring half-life: The pharmacokinetic properties of DX-2922 and DX-2930 were determined in rats and the pharmacokinetic properties of DX-2930 was determined in cynomolgus monkeys. Serum was collected at the times indicated below. The concentration of DX-2922 and DX-2930 was determined by ELISA and plotted versus time in order to obtain pharmacokinetic parameters (clearance, half life, volume of distribution, etc).

### Pharmacokinetics of DX-2922 and DX-2930 Following Single Intravenous, Subcutaneous or Intraperitoneal Administration in Rats

[0972] The objective of this study was to evaluate the pharmacokinetics of DX-2922 and DX-2930, antibody inhibitors of plasma kallikrein, following a single intravenous (IV), subcutaneous (SC), or intraperitoneal (IP) injection to male Sprague-Dawley rats.

[0973] Forty two male Sprague-Dawley rats were assigned to 7 dose groups each consisting of 6 animals. All animals were dosed on Day 0. Groups 1 through 3 received a single IV injection of 1 mg/kg, 10 mg/kg, or 20 mg/kg DX-2922, respectively. Groups 4 and 5 received a single SC or IP injection of 20 mg/kg DX-2922, respectively. Groups 6 and 7 received a single IV or SC injection of 20 mg/kg DX-2930, respectively. On Day 0, blood was collected from 3 animals/group (Cohort 1) approximately 5 minutes and 4 hours post-dose. The 3 remaining animals/group (Cohort 2), were bled approximately 1 hour post-dose. All animals from each group were bled on Days 1, 2, 4, 7, 10, 14, 18, and 21. Serum samples were analyzed using a qualified ELISA method. Pharmacokinetic parameters were calculated using WinNonlin Professional Version 5.3 (Pharsight Inc., Cary, NC). All data were analyzed noncompartmentally. The study design is summarized in Table 15.

TABLE 15
Study Design

| | | Dose | | | | |
|---|---|---|---|---|---|---|
| | | Level | | Dose | Dose | |
| | Test | (mg/ | | Concentration | Volume | # |
| Group | Article | kg/day) | Route | (mg/mL) | (mL/kg) | Animals |
| 1 | DX-2922 | 1 | IV | 0.5 | 2 | 6 |
| 2 | DX-2922 | 10 | IV | 5 | 2 | 6 |
| 3 | DX-2922 | 20 | IV | 10 | 2 | 6 |
| 4 | DX-2922 | 20 | SC | 10 | 2 | 6 |
| 5 | DX-2922 | 20 | IP | 10 | 2 | 6 |
| 6 | DX-2930 | 20 | IV | 10 | 2 | 6 |
| 7 | DX-2930 | 20 | SC | 10 | 2 | 6 |

[0974] The pharmacokinetic parameter estimates are summarized in Table 16.

TABLE 16
Summary of Mean Pharmacokinetic Parameters

| | Cₘₐₓ | AUCₗₐₛₜ | CL | Vss | t½ | F |
|---|---|---|---|---|---|---|
| Group | (μg/mL) | (hr*μg/mL) | (mL/hr/Kg) | (mL/Kg) | (hr) | (%) |
| 1 | 18.2 | 459.4 | 1.79 | 461.6 | 267.5 | n/a |
| 2 | 204.5 | 5178.5 | 1.72 | 314.2 | 204.6 | n/a |
| 3 | 384.4 | 9683.0 | 1.91 | 279.6 | 156.4 | n/a |
| 4 | 14.3 | 1912.4 | 10.23* | n/a | 115.4 | 20% |
| 5 | 0.12 | 26.12 | 629.93* | n/a | 200.53 | 0.3% |
| 6 | 414.6 | 39556.6 | 0.41 | 120.0 | 219.8 | n/a |
| 7 | 91.8 | 20421.3 | 0.97* | n/a | 57.7 | 52% |

n/a: not applicable
*CL/F

[0975] DX-2922 serum concentrations were detected from 5 minutes post-dose to 504 hours (21 Days) post-dose in all dose groups. Mean Cₘₐₓ and AUCₗₐₛₜ values following IV dosing were proportional to dose and increased in a linear fashion with increasing dose. IV clearance was rapid and independent of dose with mean values ranging from 1.72 mL/hr/Kg to 1.91 mL/hr/Kg across dose groups. Mean elimination half-life values decreased with increasing dose and ranged from 268 hours in the 1 mg/kg IV dose group to 156 hours in the 20 mg/kg dose group. Volume of distribution was greater than serum volume suggesting extravascular distribution. Following SC and IP dosing, the mean elimination half-life was 115 hours and 201 hours, respectively. The relative bioavailability when administered by the SC and IP routes were approximately 20% and 0.3%, respectively.

[0976] DX-2930 serum concentrations were detected from 5 minutes post-dose to 504 hours (21 Days) post-dose in all dose groups. Following IV dosing, mean Cₘₐₓ and AUCₗₐₛₜ values were 415 μg/mL and 39557 μg/mL*hr, respectively. Mean clearance and elimination half-life values were 0.41 mL/hr/kg and 220 hours, respectively. Volume of distribution was consistent with serum volume suggesting limited extravascular distribution. The relative bioavailability when administered by the SC route was approximately 52%.

[0977] The mean serum concentration data for DX-2930 are shown graphically in FIG. 17 and FIG. 18.

### Example 11: Epitope Mapping Using Amino Acid Mutations of pKal

[0978] Based on the epitope mapping studies described herein in Example 8, we inspected the published 3 dimensional model in the RCSB Protein Data Bank (available on the world wide web at rcsb.org; pdb code 2ANY) and identified a collection of sets of amino acids in surface accessible loops near the enzyme active site that we reasoned could interact with the antibody binding resulting in enzyme inhibition. These amino acids were substituted for alanine and the catalytic domain of each of the mutant was expressed in Pichia pastoris with a His tag fusion and purified by IMAC. Four different mutant pKal mutants were synthesized and tested:
[0979] Mutant 1: Amino acids S478, N481, S525, and K526 of the human kallikrein sequence (Accession No. NP_00883.2) were mutated to alanine. These amino acids were determined to be involved in substrate recognition (S3 subsite).
[0980] Mutant 2: Amino acid residues R551, Q553, Y555, T558 and R560 of the human kallikrein sequence (Accession No. NP_00883.2) were mutated to alanine. It was determined that these residues are involved in the active site substrate recognition (S1′ subsite).
[0981] Mutant 3: Amino acids D572, K575, and D577 of the human kallikrein sequence (Accession No. NP_00883.2) were mutated to alanine. These amino acid residues are involved in substrate recognition (S1′ subsite)
[0982] Mutant 4: Amino acids N395, S397 and S398 of the human kallikrein sequence (Accession No. NP_00883.2) were mutated to alanine. These residues are distal from the active site of plasma kallikrein.

[0983] Three of the 4 mutants (Mutant 1, 2, and 4) have similar activity to that of the wildtype catalytic domain of pKal. The amino acid substitutions in Mutant 3 yielded an inactive protein that was not recognized in SPR (Biacore) binding assays by any of the tested anti-pKal antibodies.

[0984] The antibodies tested for inhibition of mutants 1, 2 and 4 are shown herein in Table 17. Based on the measured K_{i,app} values for the antibodies in Group 1 (i.e., antibodies that inhibit human and mouse pKal but do not bind prekallikrein) it is evident that this group of antibodies binds an epitope on pKal that contains the amino acids that were mutated in Mutant 2 but were not dependent on residues mutated in Mutants 1 or 4. In addition, the interaction of plasma kallikrein binding proteins X81-B01/X101-A01/DX-2922 and affinity matured derivative X115-B07 to kallikrein is adversely affected by the substitutions in Mutant 1. For an example of the differences in the ability of the antibodies to bind prekallikrein see e.g., FIGS. 11A and 11B, which compares prekallikrein the binding of DX-2922 (Group 1) to that of M6-D09 (Group 3).

[0985] The antibodies in Group 2 (i.e., those that inhibit human pKal not mouse pkal and do not bind prekallikrein) were not significantly affected by the mutated amino acids indicating that they make contact with alternate amino acids. The Group 2 antibodies are likely to bind near the active site, as they were unable to bind pKal complexed with a Kunitz domain (EPI-KAL2), which are known to bind at the active site of a serine protease. Furthermore, one of the antibodies in Group 2 (M145-D11) is similar to those in Group 1 in that it is unable to bind pKal in a Biacore assay that is inactivated with the suicide inhibitor AEBSF (4-(2-Aminoethyl)benzenesulfonyl fluoride hydrochloride), which is a small molecule covalent inhibitor of trypsin-like serine proteases (FIG. 12). However, the other antibody (M29-D09) assigned to Group 2 was able to bind AEBSF inactivated pKal, indicating that it may bind a different epitope than M145-D11 despite sharing similar binding properties.

[0986] The antibodies in Group 3 inhibited human and mouse pKal but bound prekallikrein. One of these antibodies, M6-D09, was unable to bind pKal inactivated by either EPI-KAL2 or AEBSF, indicating that this group of pKal inhibitors interacts with alternative amino acids near the active site. The K_{i,app} for M6-D09 increased approximately 5-fold towards Mutant 2 (i.e., decreased potency of M6-D09).

### Example 12: Affinity Maturation

[0987] In addition to the affinity maturation described herein in Examples 4 and 5, which involved optimization of the light chain we attempted to further optimize affinity with libraries that vary amino acids in the CDR1, CDR2, and CDR3 regions of the variable heavy chain of two different parental anti-pKal antibodies. Both of the antibodies selected for further optimization (X63-G06 and M162-A04) exhibit desirable properties for further development as a therapeutic antibody inhibitor of plasma kallikrein; properties which include: a) complete inhibition of human and rodent plasma kallikrein and b) no binding to prekallikrein. In some embodiments, complete inhibition of human pKal is essential to block the activity of plasma kallikrein in disease uses. Inhibition of rodent pKal facilitates preclinical development including toxicity assessment. The lack of binding to prekallikrein is a highly desirable property for an antibody inhibitor of pKal to maximize the bioavailability of the antibody therapeutic towards active pKal target and to potentially reduce the dose required for efficacy.

[0988] Affinity maturation was performed using 4 different phage display libraries. For each parental antibody (e.g., 162-A04), a library was constructed that contained varied amino acid positions in both the CDR1 and the CDR2 of the heavy chain. An additional library was constructed for each of the two parental antibodies wherein positions in the CDR3 of the heavy chain were varied. Each of these 4 phage display libraries were selected (panned) with decreasing amounts of active pKal in each subsequent round in order to obtain high affinity antibodies. To minimize the appearance of prekallikrein binding in the selected antibody output libraries were initially depleted against immobilized prekallikrein. After screening as Fab fragments, we discovered the affinity matured antibodies shown in Table 16 (i.e. the antibodies with the identification number starting with “X115”).

[0989] Four discovered antibodies (X115-B07, X115-D05, X115-E09, and X115-H06) are derived from the DX-2922 parental antibody (also known as X63-G06 as a Fab fragment, X81-B01 as an IgG produced in 293T cells, or X101-A01 as an IgG produced in CHO cells) were found to be potent pKal inhibitors. For comparison the amino acid sequence of DX-2922 is shown. It is evident that three of the affinity matured antibodies (X115-B07, X115-E09, and X115-H06) contain mutations in Hv-CDR3; whereas X115-D05 has a different Hv-CDR1/CDR2. Four other discovered antibodies (X115-F02, X115-A03, X115-D01, and X115-G04) are derived from the M162-A04 parental antibody. All 8 affinity matured antibodies do not bind prekallikrein.

TABLE 17
Summary of Affinity Matured Anti-pKal Antibodies Inhibition Constants
(Ki, app) on Wild Type pKal Catalytic Domain and Mutants 1, 2, and 4^{a}.

| | WT cat. | Mutant | | Mutant | | | |
|---|---|---|---|---|---|---|---|
| | Domain | 1 Ki, | Mutant 2 | 4 Ki, | Competes | Competes | |
| | Ki, app | app | Ki, app | app | with | with epi- | |
| Isolate | (nM) | (nM) | (nM) | (nM) | AEBSF | kal2 | Characteristics |
| DX-2922 | 0.22 | 14 | 20 | 0.25 | y | y | inhibits human and |
| | | | | | | | mouse pKal; does not |
| | | | | | | | bind pre-kallikrein |
| 559A-X115-B07 | 0.13 | 4.7 | 47 | 0.14 | y | nd | inhibits human and |
| (aff mat; X101-A01 | | | | | | | mouse pKal; does not |
| parent) | | | | | | | bind pre-kallikrein |
| 559A-X115-D05 | nd | nd | nd | nd | y | nd | inhibits human and |
| (aff mat; X101-A01 | | | | | | | mouse pKal; does not |
| parent) | | | | | | | bind pre-kallikrein |
| 559A-X115-E09 | nd | nd | nd | nd | y | nd | inhibits human and |
| (aff mat; X101-A01 | | | | | | | mouse pKal; does not |
| parent) | | | | | | | bind pre-kallikrein |
| 559A-X115-HO6 | nd | nd | nd | nd | y | nd | inhibits human and |
| (aff mat; X101-A01 | | | | | | | mouse pKal; does not |
| parent) | | | | | | | bind pre-kallikrein |
| 559A-X115-A03 | 0.16 | 0.23 | 3.7 | 0.13 | y | nd | inhibits human and |
| (aff mat; M162-A04 | | | | | | | mouse pKal; does not |
| parent) | | | | | | | bind pre-kallikrein |
| 559A-X115-D01 | 0.18 | 0.26 | 2.5 | 0.12 | y | nd | inhibits human and |
| (aff mat; M162-A04 | | | | | | | mouse pKal; does not |
| parent) | | | | | | | bind pre-kallikrein |
| 559A-X115-F02 | 0.09 | 0.14 | 5.9 | 0.1 | y | y | inhibits human and |
| (aff mat; M162-A04 | | | | | | | mouse pKal; does not |
| parent) | | | | | | | bind pre-kallikrein |
| 559A-X115-G04 | 0.3 | 0.4 | 2.2 | 0.3 | y | y | inhibits human and |
| (aff mat; M162-A04 | | | | | | | mouse pKal;does not |
| parent) | | | | | | | bind pre-kallikrein |
| 559A-M29-D09 | 0.24 | 0.27 | 0.34 | 0.39 | nd | y | inhibits human and mouse |
| (sFab)) | | | | | | | pKal; does not inhibit |
| | | | | | | | mouse pKal; does |
| | | | | | | | not bind pre-kallikrein |
| 559A-M145-D11 | 0.16 | 0.23 | 0.1 | 0.21 | y | y | inhibits human and mouse |
| (sFab) | | | | | | | pKal; weakly inhibits |
| | | | | | | | mouse pKal; does |
| | | | | | | | not bind pre-kallikrein |
| | | | | | | y | |
| 559A-M06-D09 | 2.5 | 3.4 | 13.5 | 2.9 | y | y | inhibits human and |
| | | | | | | | mouse pKal; |
| | | | | | | | binds pre-kallikrein |
| 559A-M35-G04 | 0.8 | 0.09 | 1.1 | 0.8 | nd | nd | inhibits human and |
| | | | | | | | mouse pKal; |
| | | | | | | | binds pre-kallikrein |

^{a}Antibodies were obtained from HV-CDR1/2 and HV-CDR3 affinity maturation, purified and tested for inhibition of either wild type pKal catalytic domain (Note, the antibodies inhibited full length wilt type pKal approximately equal to that of the wild type catalytic domain).

TABLE 18

| | | | | | | | Full | | | | | | | |
|---|---|---|---|---|---|---|---|---|---|---|---|---|---|---|
| | | | | | | | length | WT cat. | Mutant | Mutant | Mutant | | competes | |
| | | | | | | | pKal | Domain | 1 | 2 | 4 | competes | with | |
| | LV- | LV- | LV- | HV- | HV- | HV- | Ki, app | Ki, app | Ki, app | Ki, app | Ki, app | with | epi- | |
| Isolate | CDR1 | CDR2 | CDR3 | CDR1 | CDR2 | CDR3 | (nM) | (nM) | (nM) | (nM) | (nM) | AEBSF | kal2 | Group |
| DX-2922 | RTSQ | GASS | QQSS | HYLM | YISP | VARG | 0.2 | 0.22 | 14 | 20 | 0.25 | y | y | 1 |
| | FVNS | RAT | RTPW | T | SGGH | IAAR | | | | | | | | |
| | NYLA | | T | | TIYA | SRTS | | | | | | | | |
| | | | | | DSVK | YFDY | | | | | | | | |
| | | | | | G | | | | | | | | | |
| X115-B07 | RTSQ | GASS | QQSS | HYLM | YISP | VGQG | 0.33 | | 4.7 | 47 | 0.14 | y | nd | 1 |
| | FVNS | RAT | RTPW | T | SGGH | IRGR | | | | | | | | |
| | NYLA | | T | | TIYA | SRTS | | | | | | | | |
| | | | | | DSVK | YFAQ | | | | | | | | |
| | | | | | G | | | | | | | | | |
| X115-D05 | RTSQ | GASS | QQSS | DYMM | SIVP | VARG | 0.25 | nd | nd | nd | nd | y | nd | 1 |
| | FVNS | RAT | RTPW | A | SGGH | IAAR | | | | | | | | |
| | NYLA | | T | | THYA | SRTS | | | | | | | | |
| | | | | | DSVK | YFDY | | | | | | | | |
| | | | | | G | | | | | | | | | |
| X115-E09 | RTSQ | GASS | QQSS | HYLM | YISP | VAQG | 0.34 | nd | nd | nd | nd | y | nd | 1 |
| | FVNS | RAT | RTPW | T | SGGH | IAAR | | | | | | | | |
| | NYLA | | T | | TIYA | SRTS | | | | | | | | |
| | | | | | DSVK | SVDQ | | | | | | | | |
| | | | | | G | | | | | | | | | |
| X115-H06 | RTSQ | GASS | QQSS | HYLM | YISP | VAQG | 0.35 | nd | nd | nd | nd | y | nd | 1 |
| | FVNS | RAT | RTPW | T | SGGH | ISAR | | | | | | | | |
| | NYLA | | T | | TIYA | SRTS | | | | | | | | |
| | | | | | DSVK | YFDY | | | | | | | | |
| | | | | | G | | | | | | | | | |
| M162-A04 | RASQ | KAST | QQYN | HYIM | GIYS | RRTG | | nd | nd | nd | nd | y | y | 1 |
| | SISS | LES | TYWT | M | SGGI | IPRR | | | | | | | | |
| | WLA | | | | TVYA | DAFD | | | | | | | | |
| | | | | | DSVK | I | | | | | | | | |
| | | | | | G | | | | | | | | | |
| X115-A03 | RASQ | KAST | QQYN | HYIM | GIYS | RRIG | 0.16 | 0.16 | 0.23 | 3.7 | 0.13 | y | nd | 1 |
| | SISS | LES | TYWT | M | SGGI | VPRR | | | | | | | | |
| | WLA | | | | TVYA | DSFD | | | | | | | | |
| | | | | | DSVK | M | | | | | | | | |
| | | | | | G | | | | | | | | | |
| X115-D01 | RASQ | KAST | QQYN | IYSM | SIYP | RRTG | 0.18 | 0.18 | 0.26 | 2.5 | 0.12 | y | nd | 1 |
| | SISS | LES | TYWT | H | SRGM | IPRR | | | | | | | | |
| | WLA | | | | TWYA | DAFD | | | | | | | | |
| | | | | | DSVK | I | | | | | | | | |
| | | | | | G | | | | | | | | | |
| X115-F02 | RASQ | KAST | QQYN | HYIM | GIYS | RRIG | 0.089 | 0.09 | 0.14 | 5.9 | 0.1 | y | y | 1 |
| | SISS | LES | TYWT | M | SGGI | VPRR | | | | | | | | |
| | WLA | | | | TVYA | DEFD | | | | | | | | |
| | | | | | DSVK | I | | | | | | | | |
| | | | | | G | | | | | | | | | |
| X115-G04 | RASQ | KAST | QQYN | HYIM | GIYS | RRTG | 0.6 | 0.3 | 0.4 | 2.2 | 0.3 | y | y | 1 |
| | SISS | LES | TYWT | M | SGGI | VPRR | | | | | | | | |
| | WLA | | | | TVYA | DEFD | | | | | | | | |
| | | | | | DSVK | I | | | | | | | | |
| | | | | | G | | | | | | | | | |
| M29-D09 | SGNK | QDTK | QAWD | WYTM | YIYP | GSYD | 0.7 | 0.24 | 0.27 | 0.34 | 0.39 | | y | 2 |
| | LGDK | RPS | SSIV | V | SGGA | YIWG | | | | | | | | |
| | YVA | | I | | TFYA | FYSD | | | | | | | | |
| | | | | | DSVK | H | | | | | | | | |
| | | | | | G | | | | | | | | | |
| M145-D11 | SGDK | QDIK | QAWD | HYRM | SIYP | DKFE | 0.79 | 0.16 | 0.23 | 0.1 | 0.21 | y | y | 2 |
| | LGDK | RPS | SPNA | S | SGGR | WRLL | | | | | | | | |
| | YTS | | RV | | TVYA | FRGI | | | | | | | | |
| | | | | | DSVK | GNDA | | | | | | | | |
| | | | | | G | FDI | | | | | | | | |
| M06-D09 | RASQ | AAST | QQLS | FYYM | VIYP | DKWA | 5.9 | 2.5 | 3.4 | 13.5 | 2.9 | y | y | 3 |
| | SIRN | LQS | GYPH | V | SGGI | VMPP | | | | | | | | |
| | YLN | | T | | TVYA | YYYY | | | | | | | | |
| | | | | | DSVK | AMDV | | | | | | | | |
| | | | | | G | | | | | | | | | |
| M35-G04 | RASQ | DASN | QQRS | YYHM | VISP | GGSS | 2.9 | 0.8 | 0.09 | 1.1 | 0.8 | nd | nd | 3 |
| | SVSS | RAT | NWPR | S | SGGS | DYAW | | | | | | | | |
| | YLA | | GFT | | TKYA | GSYR | | | | | | | | |
| | | | | | DSVK | RPYY | | | | | | | | |
| | | | | | G | FDY | | | | | | | | |

[0990] Equilibrium K_{i,app} measurements. Apparent Inhibition constants (K_{i,app} values) were measured by pre-incubating enzyme and inhibitor solutions prior to initiating the reactions with substrate. Enzyme and inhibitor were pre-incubated for 2 hours at 30° C. in a 96-well plate by adding 10 μL of a 10× enzyme solution and 10 μL of 10× inhibitor solutions to 70 μL of reaction buffer. Reactions were initiated by the addition of 10 μL of a 10× concentrated stock of substrate, and were monitored at 30° C. in a fluorescence plate reader with the excitation and emission wavelengths set at 360 nm/460 nm, respectively. Kinetic data were acquired by the increase in fluorescence, and initial rates for each condition were plotted against the total inhibitor concentration. The data was fit to the following equation for tight binding inhibitors:

$$A = {A}_{0} - {A}_{inh} ( \frac{( {K}_{i , app} + Inh + E ) - \sqrt{{( {K}_{i , app} + Inh + E )}^{2} - 4 \cdot Inh \cdot E}}{2 \cdot E} ) \qquad Eqn . 1$$

[0991] Where A=initial rate observed at each inhibitor concentration; Aₒ=initial rate observed in the absence of inhibitor; Aᵢₙₕ=initial rate observed for the enzyme inhibitor complex; Inh=concentration of inhibitor; E=total enzyme concentration (treated as a floated parameter); and K_{i,app}=apparent equilibrium inhibition constant.

[0992] Groups of Antibody Inhibitors. Antibodies in Group 1 inhibit human and mouse pKal but do not bind prekallikrein. Antibodies in Group 2 inhibit human but not mouse pKal and do not bind prekallikrein. Antibodies in Group 3 inhibit human and mouse pKal but bind prekallikrein.

Biacore Competition Analysis with an Exemplary Kallikrein Antibody, Epi-Kal2.

[0993] Epi-Kal2 is an antibody inhibitor of kallikrein that acts by binding to the active site of kallikrein (for sequence see Example 8). The Biacore competition analysis is used herein as an assay to determine whether a test kallikrein antibody binds to the same site as epi-Kal2 and is assessed by measuring the competition (e.g., displacement) between epi-Kal2 and the test antibody for binding to the active site.

[0994] Goat anti-human Fc fragment specific IgG or anti-human Fab IgG was immobilized by amine coupling on a CM5 sensor chip at immobilization densities of approximately 5000 RU. Anti-pKal antibodies or sFabs were captured on their respective surfaces by injecting a 50 nM solution of IgG/sFab for 1-2 minutes at 5 at μl/min. Human pKal (100 nM) or human pKal-ep-kal2 complex (100 nM hpKal that had been pre-incubated with 1 μM epi-kal2 for 1 hour at room temperature) were injected over the captured IgGs or sFabs for 5 minutes at 20-50 μl/min followed by a 5-10 minute dissociation phase. Binding responses were recorded at the end of the association phase. Anti-pKal IgGs or sFabs were considered to compete with epi-kal2 for binding to human pKal if binding of the pKal-epi-kal2 complex to anti-pKal antibodies was significantly reduced (>70%) as compared to an injection of hpKal only. The sensor chip surface was regenerated with a pulse of 10 mM glycine pH 1.5 at a flow rate of 100 μl/min. Measurements were performed at 25° C. using HBS-P (10 mM HEPES pH 7.4, 150 mM NaCl and 0.005% surfactant P20) as the running buffer. Results from the Biacore competition analysis for epi-Kal2 are shown herein in FIGS. 11A and 11B.

Biacore Competition Analysis with the Small Molecule Kallikrein Inhibitor, AEBSF.

[0995] AEBSF (i.e., 4-(2-aminoethyl)benzene sulfonyl fluoride hydrochloride) is a small molecule inhibitor of kallikrein. The Biacore competition analysis is used herein to determine whether a test antibody binds to the same site (or an overlapping site) utilized by AEBSF for kallikrein inhibition.

[0996] Goat anti-human Fc fragment specific IgG or anti-human Fab IgG was immobilized by amine coupling on a CM5 sensor chip at immobilization densities of approximately 5000 RU. Anti-pKal IgGs or sFabs were captured on their respective surfaces by injecting a 50 nM solution of IgG/sFab for 1-2 minutes at 5 at μl/min. Human pKal (100 nM) or human pKal-AEBSF complex (100 nM hpKal that had been pre-treated with 1 mM AEBSF for 1 hour at room temperature) were injected over the captured IgGs or sFabs for 5 minutes at 20-50 μl/min followed by a 5-10 minute dissociation phase. Binding responses were recorded at the end of the association phase. Anti-pKal IgGs or sFabs were considered to compete with AEBSF for binding to human pKal if binding of the pKal-AEBSF complex to anti-pKal antibodies was significantly reduced (>70%) as compared to an injection of hpKal only. The sensor chip surface was regenerated with a pulse of 10 mM glycine pH 1.5 at a flow rate of 100 μl/min. Measurements were performed at 25° C. using HBS-P (10 mM HEPES pH 7.4, 150 mM NaCl and 0.005% surfactant P20) as the running buffer. Results from the Biacore competition analysis for AEBSF are shown herein in FIG. 12.

### The Following are Sequences for the Light Chain Variable Regions (LV), and Heavy Chain Variable Regions (HV) Regions for 8 Exemplary Affinity Matured Anti-pKal Antibodies:

559A-M0029-D09-LV
QSALTQPPTVSVSPGQTARITCSGNKLGDKYVAWYQQKPGQSPMLVIYQDTKRPSRVSERFSGSNSANTAT
LSISGTQALDEADYYCQAWDSSIVIFGGGTRLTVL
559A-M0145-D11-LV
QSVLTQPPSVSVSPGQTASITCSGDKLGDKYTSWYQQRPGQSPVLVIYQDIKRPSGIPERFSGSNSGNTAT
LTISGTQAMDEADYYCQAWDSPNARVFGSGTKVTVL
559A-M0162-A04-LV
DIQMTQSPSTLSASVGDRVTITCRASQSISSWLAWYQQKPGKAPNLLIYKASTLESGVPSRFSGSGSGTEF
TLTISSLQPDDFATYYCQQYNTYWTFGQGTKVEIK
559A-X0101-A01-LV
EIVLTQSPGTLSLSPGERATLSCRTSQFVNSNYLAWYQQKPGQAPRLLIYGASSRATGIPDRFSGSGSGTD
FTLTISRLEPEDFAVYYCQQSSRTPWTFGQGTKVEIK
559A-X0115-A03-LV
DIQMTQSPSTLSASVGDRVTITCRASQSISSWLAWYQQKPGKAPKLLIYKASTLESGVPSRFSGSGSGTEF
TLTISSLQPDDFATYYCQQYNTYWTFGQGTKVEIK
559A-X0115-B07-LV
EIVLTQSPGTLSLSPGERATLSCRTSQFVNSNYLAWYQQKPGQAPRLLIYGASSRATGIPDRFSGSGSGTD
FTLTISRLEPEDFAVYYCQQSSRTPWTFGQGTKVEIK
559A-X0115-D01-LV
DIQMTQSPSTLSASVGDRVTITCRASQSISSWLAWYQQKPGKAPKLLIYKASTLESGVPSRFSGSGSGTEF
TLTISSLQPDDFATYYCQQYNTYWTFGQGTKVEIK
559A-X0115-D05-LV
EIVLTQSPGTLSLSPGERATLSCRTSQFVNSNYLAWYQQKPGQAPRLLIYGASSRATGIPDRFSGSGSGTD
FTLTISRLEPEDFAVYYCQQSSRTPWTFGQGTKVEIK
559A-X0115-E09-LV
EIVLTQSPGTLSLSPGERATLSCRTSQFVNSNYLAWYQQKPGQAPRLLIYGASSRATGIPDRFSGSGSGTD
FTLTISRLEPEDFAVYYCQQSSRTPWTFGQGTKVEIK
559A-X0115-F02-LV
DIQMTQSPSTLSASVGDRVTITCRASQSISSWLAWYQQKPGKAPKLLIYKASTLESGVPSRFSGSGSGTEF
TLTISSLQPDDFATYYCQQYNTYWTFGQGTKVEIK
559A-X0124-G01-LV
DIQMTQSPSTLSASVGDRVTITCRASQSISSWLAWYQQKPGKAPKLLIYKASTLESGVPSRFSGSGSGTEF
TLTISSLQPDDFATYYCQQYNTYWTFGQGTKVEI
559A-X0115-G04-LV
DIQMTQSPSTLSASVGDRVTITCRASQSISSWLAWYQQKPGKAPKLLIYKASTLESGVPSRFSGSGSGTEF
TLTISSLQPDDFATYYCQQYNTYWTFGQGTKVEIK
559A-X0115-H06-LV
EIVLTQSPGTLSLSPGERATLSCRTSQFVNSNYLAWYQQKPGQAPRLLIYGASSRATGIPDRFSGSGSGTD
FTLTISRLEPEDFAVYYCQQSSRTPWTFGQGTKVEIK
559A-M0006-D09-LV
DIQMTQSPSSLSASVGDRVTITCRASQSIRNYLNWYQQKPGKAPNLLIYAASTLQSGVPARFSGSGSGTDF
TLTISSLQPEDFATYYCQQLSGYPHTFGQGTKLEIK
559A-M0035-G04-LV
QDIQMTQSPATLSLSPGERATLSCRASQSVSSYLAWYQQKPGQAPRLLIYDASNRATGIPARFSGSGSGTD
FTLTISSLEPEDFAVYYCQQRSNWPRGFTFGPGTKVDIK
559A-M0029-D09-HV
EVQLLESGGGLVQPGGSLRLSCAASGFTFSWYTMVWVRQAPGKGLEWVSYIYPSGGATFYADSVKGRFTIS
RDNSKNTLYLQMNSLRAEDTAVYYCAMGSYDYIWGFYSDHWGQGTLVTVSS
559A-M0145-D11-HV
EVQLLESGGGLVQPGGSLRLSCAASGFTFSHYRMSWVRQAPGKGLEWVSSIYPSGGRTVYADSVKGRFTIS
RDNSKNTLYLQMNSLRAEDTAVYYCAKDKFEWRLLFRGIGNDAFDIWGQGTMVTVSS
559A-M0162-A04-HV
EVQLLESGGGLVQPGGSLRLSCAASGFTFSHYIMMWVRQAPGKGLEWVSGIYSSGGITVYADSVKGRFTIS
RDNSKNTLYLQMNSLRAEDTAVYYCAYRRTGIPRRDAFDIWGQGTMVTVSS
559A-X0101-A01-HV
EVQLLESGGGLVQPGGSLRLSCAASGFTFSHYLMTWVRQAPGKGLEWVSYISPSGGHTIYADSVKGRFTIS
RDNSKNTLYLQMNSLRAEDTAVYYCARVARGIAARSRTSYFDYWGQGTLVTVSS
559A-X0115-A03-HV
EVQLLESGGGLVQPGGSLRLSCAASGFTFSHYIMMWVRQAPGKGLEWVSGIYSSGGITVYADSVKGRFTIS
RDNSKNTLYLQMNSLRAEDTAVYYCAWRRIGVPRRDSFDMWGQGTMVTVSS
559A-X0115-B07-HV
EVQLLESGGGLVQPGGSLRLSCAASGFTFSHYLMTWVRQAPGKGLEWVSYISPSGGHTIYADSVKGRFTIS
RDNSKNTLYLQMNSLRAEDTAVYYCAMVGQGIRGRSRTSYFAQWGQGTLVTVSS
559A-X0115-D01-HV
EVQLLESGGGLVQPGGSLRLSCAASGFTFSIYSMHWVRQAPGKGLEWVSSIYPSRGMTWYADSVKGRFTIS
RDNSKNTLYLQMNSLRAEDTAVYYCAYRRTGIPRRDAFDIWGQGTMVTVSS
559A-X0115-D05-HV
EVQLLESGGGLVQPGGSLRLSCAASGFTFSDYMMAWVRQAPGKGLEWVSSIVPSGGHTHYADSVKGRFTIS
RDNSKNTLYLQMNSLRAEDTAVYYCARVARGIAARSRTSYFDYWGQGTLVTVSS
559A-X0115-E09-HV
EVQLLESGGGLVQPGGSLRLSCAASGFTFSHYLMTWVRQAPGKGLEWVSYISPSGGHTIYADSVKGRFTIS
RDNSKNTLYLQMNSLRAEDTAVYYCARVAQGIAARSRTSSVDQWGQGTLVTVSS
559A-X0115-F02-HV
EVQLLESGGGLVQPGGSLRLSCAASGFTFSHYIMMWVRQAPGKGLEWVSGIYSSGGITVYADSVKGRFTIS
RDNSKNTLYLQMNSLRAEDTAVYYCAYRRIGVPRRDEFDIWGQGTMVTVSS
559A-X0124-G01-HV
EVQLLESGGGLVQPGGSLRLSCAASGFTFSHYIMMWVRQAPGKGLEWVSGIYSSGGITVYADSVKGRFTIS
RDNSKNTLYLQMNSLRAEDTAVYYCAYRRIGVPRRDEFDIWGQGTMVTVSS
559A-X0115-G04-HV
EVQLLESGGGLVQPGGSLRLSCAASGFTFSHYIMMWVRQAPGKGLEWVSGIYSSGGITVYADSVKGRFTIS
RDNSKNTLYLQMNSLRAEDTAVYYCAYRRTGVPRRDEFDIWGQGTMVTVSS
559A-X0115-H06-HV
EVQLLESGGGLVQPGGSLRLSCAASGFTFSHYLMTWVRQAPGKGLEWVSYISPSGGHTIYADSVKGRFTIS
RDNSKNTLYLQMNSLRAEDTAVYYCARVAQGISARSRTSYFDYWGQGTLVTVSS
559A-M0006-D09-HV
EVQLLESGGGLVQPGGSLRLSCAASGFTFSFYYMVWVRQAPGKGLEWVSVIYPSGGITVYADSVKGRFTIS
RDNSKNTLYLQMNSLRAEDTAVYYCARDKWAVMPPYYYYAMDVWGQGTTVTVSS
559A-M0035-G04-HV
EVQLLESGGGLVQPGGSLRLSCAASGFTFSYYHMSWVRQAPGKGLEWVSVISPSGGSTKYADSVKGRFTIS
RDNSKNTLYLQMNSLRAEDTAVYYCARGGSSDYAWGSYRRPYYFDYWGQGTLVTVSS
559A-M0029-D09 LV
CAGAGCGCTTTGACTCAGCCACCCACAGTGTCTGTGTCCCCAGGACAGACAGCCAGGATCACCTGCTCTGG
AAATAAATTGGGGGATAAATATGTTGCCTGGTATCAGCAGAAGCCAGGCCAGTCCCCTATGTTGGTCATCT
ATCAAGATACTAAGCGCCCCTCAAGAGTTTCTGAGCGATTCTCTGGCTCCAACTCTGCGAATACAGCCACT
CTGTCCATCAGCGGGACCCAGGCTCTGGATGAGGCTGACTATTACTGTCAGGCGTGGGACAGCAGCATTGT
GATCTTCGGCGGAGGGACCAGGCTGACCGTCCTA
559A-M0145-D11 LV
CAGAGCGTCTTGACTCAGCCACCCTCAGTGTCCGTGTCTCCAGGACAGACAGCCAGCATCACCTGCTCTGG
AGATAAATTGGGGGATAAATATACTTCCTGGTATCAGCAGAGGCCAGGCCAGTCCCCTGTATTGGTCATCT
ATCAAGATATCAAGCGGCCCTCAGGGATCCCTGAGCGATTCTCTGGCTCCAACTCTGGGAACACAGCCACT
CTGACCATCAGCGGGACCCAGGCTATGGATGAGGCTGACTATTACTGTCAGGCGTGGGACAGTCCCAATGC
GAGGGTCTTCGGATCTGGGACCAAGGTCACCGTCCTA
559A-M0162-AO4 LV
GACATCCAGATGACCCAGTCTCCTTCCACCCTGTCTGCATCTGTAGGAGACAGAGTCACCATCACTTGCCG
GGCCAGTCAGAGTATCAGTAGTTGGTTGGCCTGGTATCAGCAGAAACCAGGGAAAGCCCCTAACCTCCTGA
TCTATAAGGCGTCTACTTTAGAAAGTGGGGTCCCATCAAGGTTCAGCGGCAGTGGATCTGGGACAGAATTC
ACTCTCACCATCAGCAGCCTGCAGCCTGATGATTTTGCAACTTATTACTGCCAACAGTATAATACTTATTG
GACGTTCGGCCAAGGGACCAAGGTGGAAATCAAA
559A-X0101-A01 LV
GAGATCGTGCTGACCCAGTCCCCTGGCACCCTGTCTCTGTCTCCCGGCGAGAGAGCCACCCTGTCCTGCCG
GACCTCCCAGTTCGTGAACTCCAACTACCTGGCTTGGTATCAGCAGAAGCCAGGCCAGGCCCCTAGACTGC
TGATCTACGGCGCCTCTTCCAGAGCCACCGGCATCCCTGACCGGTTCTCCGGCTCTGGCTCCGGCACCGAC
TTCACCCTGACCATCTCCCGGCTGGAACCTGAGGACTTCGCCGTGTACTACTGCCAGCAGTCCTCCCGGAC
CCCTTGGACCTTTGGCCAGGGCACCAAGGTGGAGATCAAG
559A-X0115-A03 LV
GACATCCAGATGACCCAGTCCCCCTCCACCCTGTCCGCCTCTGTGGGCGACAGAGTGACCATCACCTGTCG
GGCCTCCCAGTCCATCTCCAGCTGGCTGGCCTGGTATCAGCAGAAGCCCGGCAAGGCCCCCAAGCTGCTGA
TCTACAAGGCCAGCACCCTGGAATCCGGCGTGCCCTCCAGATTCTCCGGCTCTGGCTCCGGCACCGAGTTC
ACCCTGACCATCAGCTCCCTGCAGCCCGACGACTTCGCCACCTACTACTGCCAGCAGTACAACACCTACTG
GACCTTCGGCCAGGGCACCAAGGTGGAAATCAAG
559A-X0115-B07 LV
GAGATCGTGCTGACCCAGTCCCCTGGCACCCTGTCTCTGTCTCCCGGCGAGAGAGCCACCCTGTCCTGCCG
GACCTCCCAGTTCGTGAACTCCAACTACCTGGCTTGGTATCAGCAGAAGCCAGGCCAGGCCCCTAGACTGC
TGATCTACGGCGCCTCTTCCAGAGCCACCGGCATCCCTGACCGGTTCTCCGGCTCTGGCTCCGGCACCGAC
TTCACCCTGACCATCTCCCGGCTGGAACCTGAGGACTTCGCCGTGTACTACTGCCAGCAGTCCTCCCGGAC
CCCTTGGACCTTTGGCCAGGGCACCAAGGTGGAGATCAAG
559A-X0115-D01 LV
GACATCCAGATGACCCAGTCCCCCTCCACCCTGTCCGCCTCTGTGGGCGACAGAGTGACCATCACCTGTCG
GGCCTCCCAGTCCATCTCCAGCTGGCTGGCCTGGTATCAGCAGAAGCCCGGCAAGGCCCCCAAGCTGCTGA
TCTACAAGGCCAGCACCCTGGAATCCGGCGTGCCCTCCAGATTCTCCGGCTCTGGCTCCGGCACCGAGTTC
ACCCTGACCATCAGCTCCCTGCAGCCCGACGACTTCGCCACCTACTACTGCCAGCAGTACAACACCTACTG
GACCTTCGGCCAGGGCACCAAGGTGGAAATCAAG
559A-X0115-D05 LV
GAGATCGTGCTGACCCAGTCCCCTGGCACCCTGTCTCTGTCTCCCGGCGAGAGAGCCACCCTGTCCTGCCG
GACCTCCCAGTTCGTGAACTCCAACTACCTGGCTTGGTATCAGCAGAAGCCAGGCCAGGCCCCTAGACTGC
TGATCTACGGCGCCTCTTCCAGAGCCACCGGCATCCCTGACCGGTTCTCCGGCTCTGGCTCCGGCACCGAC
TTCACCCTGACCATCTCCCGGCTGGAACCTGAGGACTTCGCCGTGTACTACTGCCAGCAGTCCTCCCGGAC
CCCTTGGACCTTTGGCCAGGGCACCAAGGTGGAGATCAAG
559A-X0115-E09 LV
GAGATCGTGCTGACCCAGTCCCCTGGCACCCTGTCTCTGTCTCCCGGCGAGAGAGCCACCCTGTCCTGCCG
GACCTCCCAGTTCGTGAACTCCAACTACCTGGCTTGGTATCAGCAGAAGCCAGGCCAGGCCCCTAGACTGC
TGATCTACGGCGCCTCTTCCAGAGCCACCGGCATCCCTGACCGGTTCTCCGGCTCTGGCTCCGGCACCGAC
TTCACCCTGACCATCTCCCGGCTGGAACCTGAGGACTTCGCCGTGTACTACTGCCAGCAGTCCTCCCGGAC
CCCTTGGACCTTTGGCCAGGGCACCAAGGTGGAGATCAAG
559A-X0115-F02 LV
GACATCCAGATGACCCAGTCCCCCTCCACCCTGTCCGCCTCTGTGGGCGACAGAGTGACCATCACCTGTCG
GGCCTCCCAGTCCATCTCCAGCTGGCTGGCCTGGTATCAGCAGAAGCCCGGCAAGGCCCCCAAGCTGCTGA
TCTACAAGGCCAGCACCCTGGAATCCGGCGTGCCCTCCAGATTCTCCGGCTCTGGCTCCGGCACCGAGTTC
ACCCTGACCATCAGCTCCCTGCAGCCCGACGACTTCGCCACCTACTACTGCCAGCAGTACAACACCTACTG
GACCTTCGGCCAGGGCACCAAGGTGGAAATCAAG
559A-X0115-G04 LV
GACATCCAGATGACCCAGTCCCCCTCCACCCTGTCCGCCTCTGTGGGCGACAGAGTGACCATCACCTGTCG
GGCCTCCCAGTCCATCTCCAGCTGGCTGGCCTGGTATCAGCAGAAGCCCGGCAAGGCCCCCAAGCTGCTGA
TCTACAAGGCCAGCACCCTGGAATCCGGCGTGCCCTCCAGATTCTCCGGCTCTGGCTCCGGCACCGAGTTC
ACCCTGACCATCAGCTCCCTGCAGCCCGACGACTTCGCCACCTACTACTGCCAGCAGTACAACACCTACTG
GACCTTCGGCCAGGGCACCAAGGTGGAAATCAAG
559A-X0115-H06 LV
GAGATCGTGCTGACCCAGTCCCCTGGCACCCTGTCTCTGTCTCCCGGCGAGAGAGCCACCCTGTCCTGCCG
GACCTCCCAGTTCGTGAACTCCAACTACCTGGCTTGGTATCAGCAGAAGCCAGGCCAGGCCCCTAGACTGC
TGATCTACGGCGCCTCTTCCAGAGCCACCGGCATCCCTGACCGGTTCTCCGGCTCTGGCTCCGGCACCGAC
TTCACCCTGACCATCTCCCGGCTGGAACCTGAGGACTTCGCCGTGTACTACTGCCAGCAGTCCTCCCGGAC
CCCTTGGACCTTTGGCCAGGGCACCAAGGTGGAGATCAAG
559A-M0006-D09 LV
GACATCCAGATGACCCAGTCTCCATCCTCCCTGTCTGCATCTGTAGGAGACAGAGTCACCATCACTTGCCG
GGCAAGTCAGAGTATTCGCAACTATTTAAATTGGTATCAGCAGAAACCAGGGAAAGCCCCTAACCTCCTGA
TCTATGCTGCATCCACTTTGCAAAGTGGGGTCCCAGCAAGGTTCAGTGGCAGTGGATCTGGGACAGATTTC
ACTCTCACTATCAGCAGTCTGCAGCCTGAAGATTTTGCAACTTATTACTGTCAACAGCTTAGTGGTTACCC
CCACACTTTTGGCCAGGGGACCAAGCTGGAGATCAAA
559A-M0035-G04 LV
CAAGACATCCAGATGACCCAGTCTCCAGCCACCCTGTCTTTGTCTCCAGGGGAAAGAGCCACCCTCTCCTG
CAGGGCCAGTCAGAGTGTTAGCAGCTACTTAGCCTGGTACCAACAGAAACCTGGCCAGGCTCCCAGGCTCC
TCATCTATGATGCATCCAACAGGGCCACTGGCATCCCAGCCAGGTTCAGTGGCAGTGGGTCTGGGACAGAC
TTCACTCTCACCATCAGCAGCCTAGAGCCTGAAGATTTTGCAGTTTATTACTGTCAGCAGCGTAGCAACTG
GCCTCGCGGATTCACTTTCGGCCCTGGGACCAAAGTGGATATCAAA
559A-M0029-D09 HV
GAAGTTCAATTGTTAGAGTCTGGTGGCGGTCTTGTTCAGCCTGGTGGTTCTTTACGTCTTTCTTGCGCTGC
TTCCGGATTCACTTTCTCTTGGTACACTATGGTTTGGGTTCGCCAAGCTCCTGGTAAAGGTTTGGAGTGGG
TTTCTTATATCTATCCTTCTGGTGGCGCTACTTTTTATGCTGACTCCGTTAAAGGTCGCTTCACTATCTCT
AGAGACAACTCTAAGAATACTCTCTACTTGCAGATGAACAGCTTAAGGGCTGAGGACACGGCCGTGTATTA
CTGTGCGATGGGTTCATATGATTACATTTGGGGATTTTATAGTGACCACTGGGGCCAGGGAACCCTGGTCA
CCGTCTCAAGC
559A-M0145-D11 HV
GAAGTTCAATTGTTAGAGTCTGGTGGCGGTCTTGTTCAGCCTGGTGGTTCTTTACGTCTTTCTTGCGCTGC
TTCCGGATTCACTTTCTCTCATTACCGTATGTCTTGGGTTCGCCAAGCTCCTGGTAAAGGTTTGGAGTGGG
TTTCTTCTATCTATCCTTCTGGTGGCCGTACTGTTTATGCTGACTCCGTTAAAGGTCGCTTCACTATCTCT
AGAGACAACTCTAAGAATACTCTCTACTTGCAGATGAACAGCTTAAGGGCTGAGGACACGGCCGTGTATTA
CTGTGCGAAAGATAAGTTCGAGTGGAGGTTATTATTTCGCGGGATTGGAAATGATGCTTTTGATATCTGGG
GCCAAGGGACAATGGTCACCGTCTCAAGC
559A-M0162-A04 HV
GAAGTTCAATTGTTAGAGTCTGGTGGCGGTCTTGTTCAGCCTGGTGGTTCTTTACGTCTTTCTTGCGCTGC
TTCCGGATTCACTTTCTCTCATTACATTATGATGTGGGTTCGCCAAGCTCCTGGTAAAGGTTTGGAGTGGG
TTTCTGGTATCTATTCTTCTGGTGGCATTACTGTTTATGCTGACTCCGTTAAAGGTCGCTTCACTATCTCT
AGAGACAACTCTAAGAATACTCTCTACTTGCAGATGAACAGCTTAAGGGCTGAGGACACGGCCGTGTATTA
CTGTGCGTACCGCCGGACTGGGATTCCAAGAAGAGATGCTTTTGATATCTGGGGCCAAGGGACAATGGTCA
CCGTCTCAAGC
559A-X0101-A01 HV
GAGGTGCAATTGCTGGAATCCGGCGGAGGTCTGGTGCAGCCTGGCGGCTCCCTGAGACTGTCTTGCGCCGC
CTCCGGCTTCACCTTCTCCCACTACCTGATGACCTGGGTGCGCCAGGCTCCTGGCAAGGGCCTCGAATGGG
TGTCCTACATCTCCCCCTCTGGCGGCCACACCATCTACGCCGACTCCGTGAAGGGCCGGTTCACCATCTCC
CGGGACAACTCCAAGAACACCCTGTATCTGCAGATGAACTCCCTGAGGGCCGAGGACACCGCCGTGTACTA
CTGCGCCAGGGTGGCCAGAGGAATCGCCGCCAGGTCCCGGACCTCCTACTTCGACTACTGGGGCCAGGGCA
CCCTGGTGACCGTGTCCTCC
559A-X0115-A03 HV
GAGGTGCAATTGCTGGAATCCGGCGGAGGACTGGTGCAGCCTGGCGGCTCCCTGAGACTGTCTTGCGCCGC
CTCCGGCTTTACCTTCTCCCACTACATCATGATGTGGGTGCGACAGGCTCCAGGCAAGGGCCTGGAATGGG
TGTCCGGCATCTACTCCTCCGGCGGCATCACCGTGTACGCCGACTCCGTGAAGGGCCGGTTCACCATCTCC
CGGGACAACTCCAAGAACACCCTGTACCTGCAGATGAACTCCCTGCGGGCCGAGGACACCGCCGTGTACTA
CTGTGCCTGGCGGAGAATCGGCGTGCCCAGACGGGACTCCTTCGACATGTGGGGACAGGGCACCATGGTGA
CAGTGTCCTCC
559A-X0115-B07 HV
GAGGTGCAATTGCTGGAATCCGGCGGAGGACTGGTGCAGCCTGGCGGCTCCCTGAGACTGTCTTGCGCCGC
CTCCGGCTTCACCTTCTCCCACTACCTGATGACCTGGGTGCGACAGGCTCCTGGCAAAGGCCTGGAATGGG
TGTCCTACATCTCCCCCTCTGGCGGCCACACCATCTACGCCGACTCCGTGAAGGGCCGGTTTACCATCTCC
CGGGACAACTCCAAGAACACCCTGTACCTGCAGATGAACTCCCTGCGGGCCGAGGACACCGCCGTGTACTA
CTGTGCCATGGTCGGCCAGGGAATCCGGGGCAGATCCCGGACCTCCTACTTCGCCCAGTGGGGCCAGGGCA
CCCTGGTGACAGTGTCCTCT
559A-X0115-D01 HV
GAGGTGCAATTGCTGGAATCCGGCGGAGGACTGGTGCAGCCTGGCGGCTCCCTGAGACTGTCTTGCGCCGC
CTCCGGCTTCACCTTCTCCATCTACTCCATGCACTGGGTGCGACAGGCTCCAGGCAAGGGCCTGGAATGGG
TGTCCTCCATCTACCCCTCCCGGGGCATGACTTGGTACGCCGACTCCGTGAAGGGCCGGTTCACAATCTCC
CGGGACAACTCCAAGAACACCCTGTACCTGCAGATGAACTCCCTGCGGGCCGAGGACACCGCCGTGTACTA
CTGCGCCTACCGGCGGACCGGCATCCCTAGACGGGACGCCTTCGACATCTGGGGGCAGGGCACCATGGTGA
CAGTGTCCTCC
559A-X0115-D05 HV
GAGGTGCAATTGCTGGAATCCGGCGGTGGACTGGTGCAGCCTGGCGGCTCCCTGAGACTGTCTTGCGCCGC
CTCCGGCTTCACCTTCTCCGACTACATGATGGCCTGGGTGCGACAGGCCCCTGGCAAGGGACTGGAATGGG
TGTCCTCCATCGTGCCCTCTGGCGGCCACACCCACTACGCCGACTCCGTGAAGGGCCGGTTCACCATCTCC
CGGGACAACTCCAAGAACACCCTGTACCTGCAGATGAACTCCCTGCGGGCCGAGGACACCGCCGTGTACTA
CTGCGCCAGAGTGGCCAGAGGAATCGCCGCCAGATCCCGGACCTCCTACTTCGACTACTGGGGCCAGGGCA
CCCTGGTGACAGTGTCCTCC
559A-X0115-E09 HV
GAGGTGCAATTGCTGGAATCCGGCGGAGGACTGGTGCAGCCTGGCGGCTCCCTGAGACTGTCTTGCGCCGC
CTCCGGCTTCACCTTCTCCCACTACCTGATGACCTGGGTGCGACAGGCTCCTGGCAAAGGCCTGGAATGGG
TGTCCTACATCTCCCCCTCTGGCGGCCACACCATCTACGCCGACTCCGTGAAGGGCCGGTTTACCATCTCC
CGGGACAACTCCAAGAACACCCTGTACCTGCAGATGAACTCCCTGCGGGCCGAGGACACCGCCGTGTACTA
CTGTGCCCGGGTGGCCCAGGGAATCGCCGCCAGATCCCGGACCTCCTCTGTGGATCAGTGGGGCCAGGGCA
CCCTGGTGACAGTGTCCTCT
559A-X0115-F02 HV
GAGGTGCAATTGCTGGAATCCGGCGGAGGACTGGTGCAGCCTGGCGGCTCCCTGAGACTGTCTTGCGCCGC
CTCCGGCTTCACCTTCTCCCACTACATCATGATGTGGGTGCGACAGGCTCCTGGCAAGGGGCTGGAATGGG
TGTCCGGCATCTACTCCTCCGGCGGCATCACCGTGTACGCCGACTCCGTGAAGGGCCGGTTCACCATCTCT
CGGGACAACTCCAAGAACACCCTGTACCTGCAGATGAACTCCCTGCGGGCCGAGGACACCGCCGTGTACTA
CTGCGCCTACCGGCGGATCGGCGTGCCCAGACGGGACGAGTTCGACATCTGGGGGCAGGGCACCATGGTGA
CAGTGTCCTCC
559A-X0115-G04 HV
GAGGTGCAATTGCTGGAATCCGGCGGAGGACTGGTGCAGCCTGGCGGCTCCCTGAGACTGTCTTGCGCCGC
CTCCGGCTTCACCTTCTCTCACTACATTATGATGTGGGTGCGACAGGCTCCTGGCAAAGGCCTGGAATGGG
TGTCCGGCATCTACTCCTCCGGCGGCATCACCGTGTACGCCGACTCCGTGAAGGGCCGGTTCACCATCTCC
CGGGACAACTCCAAGAACACCCTGTACCTGCAGATGAACTCCCTGCGGGCCGAGGACACCGCCGTGTACTA
CTGCGCCTACAGACGGACCGGCGTGCCCAGACGGGACGAGTTCGATATCTGGGGGCAGGGCACCATGGTGA
CAGTGTCCTCC
559A-X0115-H06 HV
GAGGTGCAATTGCTGGAATCCGGCGGAGGACTGGTGCAGCCTGGCGGCTCCCTGAGACTGTCTTGCGCCGC
CTCCGGCTTCACCTTCTCCCACTACCTGATGACCTGGGTGCGACAGGCTCCTGGCAAAGGCCTGGAATGGG
TGTCCTACATCTCCCCCTCTGGCGGCCACACCATCTACGCCGACTCCGTGAAGGGCCGGTTTACCATCTCC
CGGGACAACTCCAAGAACACCCTGTACCTGCAGATGAACTCCCTGCGGGCCGAGGACACCGCCGTGTACTA
CTGTGCCCGGGTGGCCCAGGGAATCTCCGCCAGATCCCGGACCTCCTACTTCGATTACTGGGGCCAGGGCA
CCCTGGTGACAGTGTCCTCT
559A-M0006-D09 HV
GAAGTTCAATTGTTAGAGTCTGGTGGCGGTCTTGTTCAGCCTGGTGGTTCTTTACGTCTTTCTTGCGCTGC
TTCCGGATTCACTTTCTCTTTTTACTATATGGTTTGGGTTCGCCAAGCTCCTGGTAAAGGTTTGGAGTGGG
TTTCTGTTATCTATCCTTCTGGTGGCATTACTGTTTATGCTGACTCCGTTAAAGGTCGCTTCACTATCTCT
AGAGACAACTCTAAGAATACTCTCTACTTGCAGATGAACAGCTTAAGGGCTGAGGACACGGCCGTGTATTA
CTGTGCGAGAGATAAATGGGCGGTGATGCCCCCCTACTACTACTACGCTATGGACGTCTGGGGCCAAGGGA
CCACGGTCACCGTCTCAAGC
559A-M0035-G04 HV
GAAGTTCAATTGTTAGAGTCTGGTGGCGGTCTTGTTCAGCCTGGTGGTTCTTTACGTCTTTCTTGCGCTGC
TTCCGGATTCACTTTCTCTTATTACCATATGTCTTGGGTTCGCCAAGCTCCTGGTAAAGGTTTGGAGTGGG
TTTCTGTTATCTCTCCTTCTGGTGGCTCTACTAAGTATGCTGACTCCGTTAAAGGTCGCTTCACTATCTCT
AGAGACAACTCTAAGAATACTCTCTACTTGCAGATGAACAGCTTAAGGGCTGAGGACACTGCAGTCTACTA
TTGTGCGAGAGGCGGTTCGAGCGATTACGCTTGGGGGAGTTATCGTCGACCCTACTACTTTGACTACTGGG
GCCAGGGAACCCTGGTCACCGTCTCAAGC

### Example 13: URP Fusion Proteins of Plasma Kallikrein Binding Proteins

[0997] Table 19 shows an annotated sequence of the vector pM160G12URP12 that, in E. coli, can cause the secretion of the light chain (LC) of M160-G12 fused to URP1 and the heavy chain (HC) of M160-G12 fused to URP2. In Table 19, the numbered DNA sequence is accompanied with comments, which are denoted on each line following an exclamation point (!). The URPs have no secondary structure in the amino-acid sequence. These sequences are derived from the digits of pi.

[0998] URP1 is derived from the first 420 digits of pi. If I is a digit in pi and J is the next digit, then IM=1+integer ((10*I+j)/16). If IM is 1 or 7, the next AA is Gly, IM=2 gives Ala, 3 gives Ser, 4 gives Thr, 5 gives Glu, and 6 gives Pro. URP2 uses digits 421-840. Table 20 contains the unannotated sequence of pM160G12URP12. Table 21 gives the amino-acid sequence of LC (M160-G12)::URP1. Table 22 shows DNA that encodes HC (M160-G12)::URP2. Table 23 shows the amino-acid sequence of HC (M160-G12)::URP2.

[0999] Tables 19-23 all show the plasma kallikrein inhibiting Fab of M160-G12, an exemplary plasma kallikrein. It is contemplated herein that any of the antibodies described herein can be put into this or a similar construction. In addition, other sequences could be used for the URPs. In particular, the antibodies M162-A04, M142-H08, X63-G06, X81-B01, X67-D03, and X67-G04 could be substituted for M160-G12. Sequences from U.S. Pat. No. 7,846,445 (herein incorporated by reference in its entirety) can also be used with the plasma kallikrein binding proteins described herein.

TABLE 19
pM160G12URP12, annotated

!559A-M160-G12_0III 5932 bp DNA circular
!Input=F:\pKal_Ab\559 a-m160-g12_LCHC_03_urpv2.ibi
!559A-M160-G127:URP 5932 CIRCULAR
!Ngene =5932
!
!Useful REs (cut MAnoLI fewer than 3 times) 2003.02.04
!
!Non-cutters

| | | |
|---|---|---|
| !AfeI AGCgct | AvrII Cctagg | BamHI Ggatcc |
| !BclI Tgatca | BglII Agatet | BmgBI CACgtc |
| !BsaBI GATNNnnatc | BsiWI Cgtacg | BsmI NGcattc |
| !BspDI ATcgat | BspMI Nnnnnnnnngcaggt | BsrGI Tgtaca |
| !BstAPI GCANNNNntgc | BstBI TTcgaa | BstZ17I GTAtac |
| !BtrI CACgtg | ECl136I GAGctc | EcoRV GATatc |
| !FseI GGCCGGcc | HpaI GTTaac | NdeI CAtatg |
| !NsiI ATGCAt | PacI TTAATtaa | PmeI GTTTaaac |
| !PmlI CACgtg | PshAI GACNNnngtc | RsrII CGgwccg |
| !SacI GAGCTc | SacII CCGCgg | SalI Gtcgac |
| !SbfI CCTGCAgg | SgfI GCGATcgc | SnaBI TACgta |
| !SphI GCATGc | Sse8387I CCTGCAgg | StuI AGGcct |
| !SwaI ATTTaaat | TliI Ctcgag | XcmI CCANNNNNnnnntgg |
| !XhoI Ctcgag | | |
| ! | | |
| !cutters | | |

!Enzymes that cut more than 5 times.

| | |
|---|---|
| !AgeI Accggt | 6 |
| !BsiHKAI GWGCWc | 9 |
| !BsrFI Rccggy | 15 |
| !EarI CTCTTCNnnn | 6 |
| !Eco57I CTGAAG | 7 |
| !EcoO109I RGgnccy | 7 |
| !FauI nNNNNNNGCGGG | 10 |

| | |
|---|---|
| !HgiAI GWGCWc | 9 |
| ! | |

!Enzymes that cut from 1 to 5 times.
!$ = DAM site, * = DCM site, & = both
!

| !BssSI Ctcgtg | 1 | 12 | | | | |
|---|---|---|---|---|---|---|
| Cacgag | 1 | 1703 | | | | |
| !BspHI Tcatga | 4 | 43 | 148 | 1156 | 3665$ | |
| !AatII GACGTc | 1 | 65 | | | | |
| !BciVI GTATCCNNNNNN | 2 | 140 | 1667 | | | |
| !AvaI Cycgrg | 3 | 319 | 4010 | 5628 | | |
| !BcgI gcannnnnntcg | 2 | 461 | 4021$ | | | |
| !ScaI AGTact | 4 | 505 | 3232 | 3529 | 4573 | |
| !Pvul CGATcg | 3 | 616$ | 4027$ | 5176$ | | |
| !FspI TGCgca | 2 | 763 | 5196 | | | |
| !BglI GCCNNNNnggc | 5 | 864 | 3538 | 3694 | 4945 | 5202 |
| !BpmI CTGGAG | 1 | 898 | | | | |
| !BsaI GGTCTCNnnnn | 1 | 916 | | | | |
| !-″- nnnnngagacc | 2 | 3386 | | | | |
| !AhdI GACNNNnngtc | 2 | 983 | 5019* | | | |
| !Eam1105I GACNNNnngtc | 2 | 983 | 5019* | | | |
| !AlwNI CAGNNNctg | 2 | 1462 | 2923 | | | |
| !DrdI GACNNNNnngtc | 3 | 1768 | 5562 | 5831 | | |
| !PciI Acatgt | 1 | 1876 | | | | |
| !SapI gaagagc | 1 | 1998 | | | | |
| !PvuII CAGctg | 2 | 2054 | 5146 | | | |
| !PflMI CCANNNNntgg | 1 | 2233 | | | | |
| !HindIII Aagett | 2 | 2235 | 3655 | | | |
| !ApaLI Gtgcac | 1 | 2321 | | | | |
| !PflFI GACNnngtc | 3 | 2340 | 2377 | 4197 | | |
| !Tth111I GACNnngtc | 3 | 2340 | 2377 | 4197 | | |
| !BsmFI Nnnnnnnnnnnnnnngtccc | 1 | 2485 | | | | |
| !-″- GGGACNNNNNNNNNNnn | 2 | 2530 | | | | |
| !PpuMI RGgwccy | 3 | 2498 | 3024 | 4587 | | |
| !SanDI GGgwccc | 1 | 2498 | | | | |
| !EcoRI Gaattc | 2 | 2536 | 5056 | | | |
| !PstI CTGCAg | 1 | 2560 | | | | |
| !HincII GTYrac | 1 | 2591 | | | | |
| !StyI Ccwwgg | 4 | 2633 | 3704 | 4094 | 4361 | |
| !BsgI ctgcac | 1 | 2660 | | | | |
| !-″- GTGCAG | 1 | 5751 | | | | |
| !BbsI gtcttc | 2 | 2671 | 4108 | | | |
| !BlpI GCtnagc | 1 | 2868 | | | | |
| !EspI GCtnagc | 1 | 2868 | | | | |
| !AccI GTmkac | 1 | 2899 | | | | |
| !SgrAI CRccggyg | 2 | 2936 | 3585 | | | |
| !Acc65I Ggtacc | 1 | 2971 | | | | |
| !KpnI GGTACc | 1 | 2971 | | | | |
| !BsmBI GGTCTCNnnnn | 3 | 3104 | 4077 | 5877 | | |
| !-″- Nnnnnngagacg | 1 | 5925 | | | | |
| !Bsu36I CCtnagg | 3 | 3121 | 3310 | 4657* | | |
| !NaeI GCCggc | 3 | 3148 | 3699 | 5416 | | |
| !NgoMIV Gccggc | 3 | 3148 | 3699 | 5416 | | |
| !EagI Cggccg | 4 | 3284 | 3983 | 4397 | 4805 | |
| !BspEI Tccgga | 4 | 3453* | 3784 | 4905 | 4959 | |
| !SexAI Accwggt | 2 | 3459* | 4665* | | | |
| !BseRI NNnnnnnnnnctcctc | 4 | 3466* | 4115 | 4634 | 4960* | |
| !EcoNI CCTNNnnnagg | 3 | 3604 | 3832* | 4167* | | |
| !AscI GGcgcgcc | 1 | 3613 | | | | |
| !BssHII Gcgcgc | 1 | 3614 | | | | |
| !SfiI GGCCNNNNnggcc | 1 | 3693 | | | | |
| !BtgI Ccrygg | 1 | 3704 | | | | |
| !DsaI Ccrygg | 1 | 3704 | | | | |
| !NcoI Ccatgg | 1 | 3704 | | | | |
| !MfeI Caattg | 1 | 3718 | | | | |
| !BstXI CCANNNNNntgg | 1 | 3825* | | | | |
| !MscI TGGcca | 1 | 3876 | | | | |
| !XbaI Tetaga | 1 | 3922 | | | | |
| !AflII Cttaag | 1 | 3966 | | | | |
| !XmaI Cccggg | 1 | 4010 | | | | |
| !NruI TCGcga | 1 | 4030$ | | | | |
| !BstEII Ggtnacc | 1 | 4071* | | | | |
| !ApaI GGGCCc | 1 | 4098 | | | | |
| !BanII GRGCYc | 4 | 4098 | 4381 | 4602 | 5446 | |
| !Bsp120I Gggccc | 1 | 4098 | | | | |
| !PspOMI Gggccc | 1 | 4098 | | | | |
| !NheI Gctagc | 1 | 4116 | | | | |
| !KasI Ggcgcc | 3 | 4216 | 4465 | 5217 | | |
| !NotI GCggccgc | 1 | 4396 | | | | |
| !SpeI Actagt | 1 | | 5020* | | | |
| !MluI Acgcgt | 1 | | 5045 | | | |
| !BsaAI YACgtr | 1 | | 5519 | | | |
| !DraIII CACNNNgtg | 1 | | 5519 | | | |
| !PsiI TTAtaa | 1 | | 5647 | | | |

!---------------------------------------------------------------

| | |
|---|---|
| 1 | gacgaaaggg cctcgtgata cgcctatttt tataggttaa tgtcatgata ataatggttt |
| 61 | cttaGACGTC aggtggcact tttcggggaa atgtgcgcgg aacccctatt tgtttatttt |
| ! | AatII. |
| 121 | tctaaataca ttcaaatatg tatccgctca tgagacaata accctgataa atgcttcaat |
| 181 | aatattgaaa aaggaagagt atgagtattc aacatttccg tgtcgccctt attccctttt |
| 241 | ttgcggcatt ttgccttcct gtttttgctc acccagaaac gctggtgaaa gtaaaagatg |
| 301 | ctgaagatca gttgggtgcc cgagtgggtt acatcgaact ggatctcaac agcggtaaga |
| 361 | tccttgagag ttttcgcccc gaagaacgtt ttccaatgat gagcactttt aaagttctgc |
| 421 | tatgtggcgc ggtattatcc cgtattgacg ccgggcaaga gcaactcggt cgccgcatac |
| 481 | actattctca gaatgacttg gttgagtact caccagtcac agaaaagcat cttacggatg |
| 541 | gcatgacagt aagagaatta tgcagtgctg ccataaccat gagtgataac actgcggcca |
| 601 | acttacttct gacaacgatc ggaggaccga aggagctaac cgcttttttg cacaacatgg |
| 661 | gggatcatgt aactcgcctt gatcgttggg aaccggagct gaatgaagcc ataccaaacg |
| 721 | acgagcgtga caccacgatg cctgtagcaa tggcaacaac gttgcgcaaa ctattaactg |
| 781 | gcgaactact tactctagct tcccggcaac aattaataga ctggatggag gcggataaag |
| 841 | ttgcaggacc acttctgcgc tcggcccttc cggctggctg gtttattgct gataaatCTG |
| ! | BpmI. |
| 901 | GAGccggtga gcgtgggtct cgcggtatca ttgcagcact ggggccagat ggtaagccct |
| ! | BpmI. |
| 961 | cccgtatcgt agttatctac acgacgggga gtcaggcaac tatggatgaa cgaaatagac |
| 1021 | agatcgctga gataggtgcc tcactgatta agcattggta actgtcagac caagtttact |
| 1081 | catatatact ttagattgat ttaaaacttc atttttaatt taaaaggatc taggtgaaga |
| 1141 | tcctttttga taatctcatg accaaaatcc cttaacgtga gttttcgttc cactgagcgt |
| 1201 | cagaccccgt agaaaagatc aaaggatctt cttgagatcc tttttttctg cgcgtaatct |
| 1261 | gctgcttgca aacaaaaaaa ccaccgctac cagcggtggt ttgtttgccg gatcaagagc |
| 1321 | taccaactct ttttccgaag gtaactggct tcagcagagc gcagatacca aatactgttc |
| 1381 | ttctagtgta gccgtagtta ggccaccact tcaagaactc tgtagcaccg cctacatacc |
| 1441 | tcgctctgct aatcctgtta ccagtggctg ctgccagtgg cgataagtcg tgtcttaccg |
| 1501 | ggttggactc aagacgatag ttaccggata aggcgcagcg gtcgggctga acggggggtt |
| 1561 | cgtgcataca gcccagcttg gagcgaacga cctacaccga actgagatac ctacagcgtg |
| 1621 | agctatgaga aagcgccacg cttcccgaag ggagaaaggc ggacaggtat ccggtaagcg |
| 1681 | gcagggtcgg aacaggagag cgcacgaggg agcttccagg gggaaacgcc tggtatcttt |
| 1741 | atagtcctgt cgggtttcgc cacctctgac ttgagcgtcg atttttgtga tgctcgtcag |
| 1801 | gggggcggag cctatggaaa aacgccagca acgcggcctt tttacggttc ctggcctttt |
| 1861 | gctggccttt tgctcACATG Ttctttcctg cgttatcccc tgattctgtg gataaccgta |
| ! | PciI... |
| 1921 | ttaccgcctt tgagtgagct gataccgctc gccgcagccg aacgaccgag cgcagcgagt |
| 1981 | cagtgagcga ggaagcgGAA GAGCgcccaa tacgcaaacc gcctctcccc gcgcgttggc |
| ! | SapI.... |
| 2041 | cgattcatta atgcagctgg cacgacaggt ttcccgactg gaaagcgggc agtgagcgca |
| 2101 | acgcaattaa tgtgagttag ctcactcatt aggcacccca ggctttacac tttatgcttc |
| 2161 | cggctcgtat gttgtgtgga attgtgagcg gataacaatt tcacacagga aacagctatg |
| 2221 | accatgatta cgccaagctt tggagccttt tttttggaga ttttcaac |
| ! | |

!M160-G12 LC

| | |
|---|---|
| !QDIQMTQSPS FLSASVGDRV TITCRASQGI SSYLAWYQQK PGKAPKLLIY AASTLQSGVP | 60 |
| !SRFSGSGSGT EFTLTISSLQ PEDFATYYCQ QLNSYPLTFG GGTKVEIK | 108 |

!

| | |
|---|---|
| ! | LC signal sequence---------------------------------------- |
| ! | 1 2 3 4 5 6 7 8 9 10 11 12 13 14 15 |
| ! | M K K L L F A I P L V V P F Y |
| 2269 | atg aaa aaa tta tta ttc gca att cct tta gtt gtt cct ttc tat |
| ! | |
| ! | signal----- \| LC Vkappa------------------------------ |
| ! | 16 17 18 19 20 21 22 23 24 25 26 27 28 29 30 |
| ! | S H S A Q D I Q M T Q S P S F |
| 2314 | tct cac aGT GCA Caa gac atc cag atg acc cag tct cca tcc ttc |
| ! | ApaLI... |
| ! | |
| ! | LC Vkappa-------------------------------------------------- |
| ! | 31 32 33 34 35 36 37 38 39 40 41 42 43 44 45 |
| ! | L S A S V G D R V T I T C R A |
| 2359 | ctg tct gca tct gta gga gac aga gtc acc atc act tgc cgg gcc |
| ! | LC Vkappa-------------------------------------------------- |
| ! | 46 47 48 49 50 51 52 53 54 55 56 57 58 59 60 |
| ! | S Q G I S S Y L A W Y Q Q K P |
| 2404 | agt cag ggc att agc agt tat tta gcc tgg tat cag caa aaa cca |
| ! | |
| | LC Vkappa-------------------------------------------------- |
| ! | 61 62 63 64 65 66 67 68 69 70 71 72 73 74 75 |
| ! | G K A P K L L I Y A A S T L Q |
| 2449 | ggg aaa gcc cct aag ctc ctg atc tat gct gca tcc act ttg caa |
| ! | |
| ! | LC Vkappa-------------------------------------------------- |
| ! | 76 77 78 79 80 81 82 83 84 85 86 87 88 89 90 |
| ! | S G V P S R F S G S G S G T E |
| 2494 | agt gGG GTC CCa tca agg ttc agc ggc agt gga tct ggg aca gaa |
| ! | SanDI.... |
| ! | |
| ! | LC Vkappa-------------------------------------------------- |
| ! | 91 92 93 94 95 96 97 98 100 101 102 103 104 105 106 |
| ! | F T L T I S S L Q P E D F A T |
| !2539 | ttc act ctc aca atc agc agc CTG CAG cct gaa gat ttt gca act |
| ! | PstI... |
| ! | |
| ! | LC Vkappa-------------------------------------------------- |
| ! | 106 107 108 109 110 111 112 113 114 115 116 117 118 119 120 |
| ! | Y Y C Q Q L N S Y P L T F G G |
| 2584 | tat tac tGT CAA Cag ctt aat agt tac cct ctc act ttc ggc gga |
| ! | HincII.. |
| ! | |
| ! | LC Vkappa-------------------\| Ckappa----------------------- |
| ! | 121 122 123 124 125 126 127 128 129 130 131 132 133 134 135 |
| ! | G T K V E I K R T V A A P S V |
| 2629 | ggg acc aag gtg gag atc aaa cga act gtg gct gca cca tct gtc |
| ! | |
| ! | Ckappa----------------------------------------------------- |
| ! | 136 137 138 139 140 141 142 143 144 145 146 147 148 149 150 |
| ! | F I F P P S D E Q L K S G T A |
| 2674 | ttc atc ttc ccg cca tct gat gag cag ttg aaa tct gga act gcc |
| ! | |
| ! | Ckappa----------------------------------------------------- |
| ! | 151 152 153 154 155 156 157 158 159 160 161 162 163 164 165 |
| ! | S V V C L L N N F Y P R E A K |
| 2719 | tct gtt gtg tgc ctg ctg aat aac ttc tat ccc aga gag gcc aaa |
| ! | |
| ! | Ckappa----------------------------------------------------- |
| ! | 166 167 168 169 170 171 172 173 174 175 176 177 178 179 180 |
| ! | V Q W K V D N A L Q S G N S Q |
| 2764 | gta cag tgg aag gtg gat aac gcc ctc caa tcg ggt aac tcc cag |
| ! | |
| ! | Ckappa----------------------------------------------------- |
| ! | 181 182 183 184 185 186 187 188 189 190 191 192 193 194 195 |
| ! | E S V T E Q D S K D S T Y S L |
| 2809 | gag agt gtc aca gag cag gac agc aag gac agc acc tac agc ctc |
| ! | |
| ! | Ckappa----------------------------------------------------- |
| ! | 196 197 198 199 200 201 202 203 204 205 206 207 208 209 210 |
| ! | S S T L T L S K A D Y E K H K |
| 2854 | agc agc acc ctg acG GTG AGC aaa gca gac tac gag aaa cac aaa |
| ! | BlpI..... |
| ! | |
| ! | Ckappa----------------------------------------------------- |
| ! | 211 212 213 214 215 216 217 218 219 220 221 222 223 224 225 |
| ! | V Y A C E V T H Q G L S S P V |
| 2899 | GTC TAC gcc tgc gaa gtc acc cat cag ggc ctg agt tca ccg gtg |
| ! | AccI... |
| ! | |
| ! | Ckappa-------------------------------! URP------------------ |
| ! | 226 227 228 229 230 231 232 233 234 235 236 237 238 239 240 |
| ! | T K S F N R G E C G T A S T A |
| 2944 | aca aag agc ttc aac agg gga gag tgt GGT ACC gct tct act gcc |
| ! | KpnI... |
| ! | |
| ! | URP-------------------------------------------------------- |
| 2989 | 241 242 243 244 245 246 247 248 249 250 251 252 253 254 255 |
| ! | T T G P A P T E S P A P G P S |
| ! | acc act ggt cct gct cct act gaa tcc cct gct ccg ggt cct tct |
| ! | |
| ! | URP-------------------------------------------------------- |
| ! | 256 257 258 259 260 261 262 263 264 265 266 267 268 269 270 |
| ! | G A P G S T G P G E P S P S E |
| 3034 | ggt gct cct ggc tct act ggt cct ggt gag ccg agt cct agt gaa |
| ! | |
| ! | URP-------------------------------------------------------- |
| ! | 271 272 273 274 275 276 277 278 279 280 281 282 283 284 285 |
| ! | A T T P A P G T P S P T S G P |
| 3079 | gcc acc act cct gct cct ggt act ccg tct cct act tcc ggc cct |
| ! | |
| ! | URP-------------------------------------------------------- |
| ! | 286 287 288 289 290 291 292 293 294 295 296 297 298 299 300 |
| ! | E G A T G E G A A G E P P P S |
| 3124 | gag ggt gct acc ggt gaa ggt gct gcc ggc gag cct ccg cct tct |
| ! | |
| ! | URP-------------------------------------------------------- |
| ! | 301 302 303 304 305 306 307 308 309 310 311 312 313 314 315 |
| ! | G T G P A A A S P G G P P G E |
| 3169 | ggt act ggt cct gct gct gct tct cct ggt ggc ccg cct ggt gaa |
| ! | |
| ! | URP-------------------------------------------------------- |
| ! | 316 317 318 319 320 321 322 323 324 325 326 327 328 329 330 |
| ! | T A S G P A S T G G T G S T A |
| 3214 | act gcc agt ggt cct gct agt act ggt ggc acc ggt tct act gct |
| ! | |
| ! | URP-------------------------------------------------------- |
| ! | 331 332 333 334 335 336 337 338 339 340 341 342 343 344 345 |
| ! | T P T S S A E S P A G T E P S |
| 3259 | act cct act tcc tct gct gag tct ccg gcc ggt act gaa cct agt |
| ! | |
| ! | URP-------------------------------------------------------- |
| ! | 346 347 348 349 350 351 352 353 354 355 356 357 358 359 360 |
| ! | S G P E E P S E E P A T E A A |
| 3304 | agt ggt cct gag gaa cct tct gag gaa ccg gct act gag gct gct |
| ! | |
| ! | URP-------------------------------------------------------- |
| ! | 361 362 363 364 365 366 367 368 369 370 371 372 373 374 375 |
| ! | G G T T T E A S G T T G T S E |
| 3349 | ggc ggt act act acc gaa gcc tcc ggt act act ggt act tct gag |
| ! | |
| ! | URP-------------------------------------------------------- |
| ! | 376 377 378 379 380 381 382 383 384 385 386 387 388 389 390 |
| ! | T A s P E E E A P S A S A T P |
| 3394 | acc gct tct cct gaa gag gaa gct cct agt gct agt gcc act cct |
| ! | |
| ! | URP-------------------------------------------------------- |
| ! | 391 392 393 394 395 396 397 398 399 400 401 402 403 404 405 |
| ! | G E T G T P E P G A P G T P P |
| 3439 | ggc gag act ggt act ccg gaa cct ggt gct cct ggt act cct ccg |
| ! | |
| ! | URP-------------------------------------------------------- |
| ! | 406 407 408 409 410 411 412 413 414 415 416 417 418 419 420 |
| ! | T G A G S S E P A G S G G S G |
| 3484 | act ggc gct ggt tct tcc gag cct gct ggt tct ggt ggc tct ggt |
| ! | |
| ! | URP-------------------------------------------------------- |
| ! | 421 422 423 424 425 426 427 428 429 430 431 432 433 434 435 |
| ! | S T P A S E A S S S P A S T A |
| 3529 | agt act cct gcc agt gag gct tct tcc tct cct gct tct act gct |
| ! | |
| ! | URP---------------------------------------- |
| ! | 436 437 438 439 440 441 442 443 444 445 446 447 448 |
| ! | G S S T A G E E P P P . . |
| 3574 | ggt agt agt acc gcc ggt gag gaa ccg cct cct taa taa |
| ! | |
| 3613 | GGCG CGCCtaacca tctatttcaa |
| ! | Asci..... |
| ! | BssHII. |
| 3637 | ggaacagtc tta |
| ! | |

!M160-G12 HC

| | |
|---|---|
| !EVQLLESGGG LVQPGGSLRL SCAASGFTFS HYLMTWVRQA PGKGLEWVSY ISPSGGHTIY | 60 |
| !ADSVKGRFTI SRDNSKNTLY LQMNSLRAED TAVYYCARVA RGIAARSRTS YFDYWGQGTL | 120 |
| !VTVSSASTKG PSVFPLAPSS KS | 142 |

!

| | |
|---|---|
| ! | HC signal sequence------------------------------------------ |
| ! | 1 2 3 4 5 6 7 8 9 10 11 12 13 14 15 |
| ! | M K K L L F M I P L V V P F V |
| 3649 | atg aaa aag ctt tta ttc atg atc ccg tta gtt gta ccg ttc gtG |
| ! | SfiI . |
| ! | |
| ! | signal sequence-------------------------------------------- |
| ! | 16 17 18 19 20 21 22 23 24 25 26 27 28 29 30 |
| ! | A Q P A M A E V Q L L E S G G |
| 3694 | GCC GAG CCG GGC atg gcc gaa gtt CAA TTG tta gag tct ggt ggc |
| ! | SfiI........... MfeI... |
| ! | NcoI.... |
| ! | |
| ! | VH-------------------------------------------------------- |
| ! | 31 32 33 34 35 36 37 38 39 40 41 42 43 44 45 |
| ! | G L V Q P G G S L R L S C A A |
| 3739 | ggt ctt gtt cag cct ggt ggt tct tta cgt ctt tct tgc gct gct |
| ! | |
| ! | VH-------------------------------------------------------- |
| | 46 47 48 49 50 51 52 53 54 55 56 57 58 59 60 |
| ! | S G F T F S H Y L M T W V R Q |
| 3784 | tcc gga ttc act ttc tct cat tac ctt atg act tgg gtt cgc caa |
| ! | |
| ! | 61 62 63 64 65 66 67 68 69 70 71 72 73 74 75 |
| ! | A P G K G L E W V S Y I S P S |
| 3829 | gct cct ggt aaa ggt ttg gag tgg gtt tct tat atc tct cct tct |
| ! | |
| ! | VH-------------------------------------------------------- |
| ! | 76 77 78 79 80 81 82 83 84 85 86 87 88 89 90 |
| ! | G G H T I Y A D S V K G R F T |
| 3874 | ggt ggc cat act att tat gct gac tcc gtt aaa ggt cgc ttc act |
| ! | |
| ! | VH--------------------------------------------------------- |
| ! | 91 92 93 94 95 96 97 98 99 100 101 102 103 104 105 |
| ! | I S R D N S K N T L Y L Q M N |
| 3919 | atc TCT AGA gac aac tct aag aat act ctc tac ttg cag atg aac |
| ! | |
| ! | VH-------------------------------------------------------- |
| ! | 106 107 108 109 110 111 112 113 114 115 116 117 118 119 120 |
| ! | S L R A E D T A V Y Y C A R V |
| 3964 | agc tta agg gct gag gac acg gcc gtg tat tac tgt gcg aga gtg |
| ! | |
| ! | VH-------------------------------------------------------- |
| ! | 121 122 123 124 125 126 127 128 129 130 131 132 133 134 135 |
| ! | A R G 1 A A R S R T S Y F D Y |
| 4009 | gCC CGG Ggg ata gca gct cga TCG CGA acc agc tac ttt gac tac |
| ! | XmaI.... NruI... |
| ! | |
| ! | VH---------------------------------------- |
| ! | 136 137 138 139 140 141 142 143 144 145 146 147 148 149 150 |
| ! | W G Q G T L V T V S S A S T K |
| 4054 | tgg ggc cag gga acc ctG GTC ACC gtc tca agc gcc tcc acc aaG |
| | BstEII... Bspl20I . |
| ! | |
| | 151 152 153 154 155 156 157 158 159 160 161 162 163 164 165 |
| ! | G P S V F P L A P S S K S T S |
| 4099 | GGC CCa tcg gtc ttc ccG CTA GCa ccc tcc tcc aag agc acc tct |
| ! | Bspl20I. |
| ! | |
| ! | 256 257 258 259 260 261 262 263 264 265 266 267 268 269 270 |
| ! | T A S A S T A P A T A T P E S |
| 4144 | act gct tcc gct tct act gcc ccg gct act gct acc cct gag tct |
| ! | |
| ! | 271 272 273 274 275 276 277 278 279 280 281 282 283 284 285 |
| ! | A E G A T T E T P T T E T P A |
| !4459 | gct gaa ggc gcc act act gag act cct acc act gaa act cct gct |
| ! | |
| ! | 286 287 288 289 290 291 292 293 294 295 296 297 298 299 300 |
| ! | E S A S G P P A P S E S A T E |
| 4504 | gag agt gct agt ggt ccg cct gct cct tct gaa tcc gcc act gag |
| ! | |
| ! | 301 302 303 304 305 306 307 308 309 310 311 312 313 314 315 |
| ! | E S G E A S T S S T A E E G P |
| 4549 | gaa tct ggt gag gct tct acc agt agt act gct gaa gag ggt cct |
| ! | |
| ! | 316 317 318 319 320 321 322 323 324 325 326 327 328 329 330 |
| ! | A E P G S P A P T P A A T P A |
| 4594 | gct gaa ccg ggc tct cct gcc cct act cct gct gct act ccg gct |
| ! | |
| ! | 331 332 333 334 335 336 337 338 339 340 341 342 343 344 345 |
| ! | E T S S E P P E E P G G A G T |
| 4639 | gag acc tcc tct gaa cct cct gag gaa cct ggt ggt gcc ggt act |
| ! | |
| ! | 346 347 348 349 350 351 352 353 354 355 356 357 358 359 360 |
| ! | P A G T T T G A E T E S A T E |
| 4684 | ccg gct ggc act act acc ggt gct gag act gaa tct gct act gag |
| ! | |
| ! | 361 362 363 364 365 366 367 368 369 370 371 372 373 374 375 |
| ! | G G A S S A P A S P T G G A P |
| 4729 | ggt ggt gcc agt agt gct cct gct tct cct act ggc ggt gct cct |
| ! | |
| ! | 376 377 378 379 380 381 382 383 384 385 386 387 388 389 390 |
| ! | S S G E T T T E G G P A G P A |
| 4774 | tcc tct ggt gaa acc act act gag ggt ggc ccg gcc ggt cct gct |
| ! | |
| ! | 391 392 393 394 395 396 397 398 399 400 401 402 403 404 405 |
| ! | P A T A A P T G G G A G G E G |
| 4819 | cct gct act gct gcc cct acc ggt ggt ggc gct ggt ggt gaa ggt |
| ! | |
| ! | 406 407 408 409 410 411 412 413 414 415 416 417 418 419 420 |
| ! | S A G G G T G E E G G G G A P |
| 4864 | tct gct ggc ggt ggt act ggt gag gaa ggc ggt ggt ggt gct ccg |
| ! | |
| ! | 421 422 423 424 425 426 427 428 429 430 431 432 433 434 435 |
| ! | E G S G G G P E G P T P A T E |
| 4909 | gag ggc agt ggt ggt ggt cct gaa ggc cct act cct gcc act gag |
| ! | |
| ! | 436 437 438 439 440 441 442 443 444 445 446 447 448 449 450 |
| ! | A S P E G A P P G S T S T S G |
| 4954 | gct agt ccg gaa ggt gct cct cct ggt tct acc tcc act tct ggt |
| ! | |
| ! | 451 452 453 454 455 456 457 458 459 460 461 462 463 |
| ! | P G E A A S P T S S P G . |
| 4999 | cct ggc gag gct gcc tct ccg ACT AGT agt cct ggt taa |
| ! | SpeI... |
| ! | |
| 5038 | tga taa |
| ! | |
| 5044 | aACGC GTgatgaga attcactggc cgtcgtttta caacgtcgtg actgggaaaa |
| | MLuI... |
| ! | |
| 5098 | ccctggcgtt acccaactta atcgccttgc agcacatccc cctttcgcca gctggcgtaa |
| 5158 | tagcgaagag gcccgcaccg atcgcccttc ccaacagttg cgcagcctga atggcgaatg |
| 5218 | gcgcctgatg cggtattttc tccttacgca tctgtgcggt atttcacacc gcatacgtca |
| 5278 | aagcaaccat agtacgcgcc ctgtagcggc gcattaagcg cggcgggtgt ggtggttacg |
| 5338 | cgcagcgtga ccgctacact tgccagcgcc ttagcgcccg ctcctttcgc tttcttccct |
| 5398 | tcctttctcg ccacgttcgc cggctttccc cgtcaagctc taaatcgggg gctcccttta |
| 5458 | gggttccgat ttagtgcttt acggcacctc gaccccaaaa aacttgattt gggtgatggt |
| 5518 | tCACGTAgtg ggccatcgcc ctgatagacg gtttttcgcc ctttgacgtt ggagtccacg |
| | BsaAI. |
| | DraIII... |
| 5578 | ttctttaata gtggactctt gttccaaact ggaacaacac tcaactctat ctcgggctat |
| 5638 | tcttttgatT TATAAgggat tttgccgatt tcggtctatt ggttaaaaaa tgagctgatt |
| | PsiI... |
| 5698 | taacaaaaat ttaacgcgaa ttttaacaaa atattaacgt ttacaatttt atggtgcagt |
| 5758 | ctcagtacaa tctgctctga tgccgcatag ttaagccagc cccgacaccc gccaacaccc |
| 5818 | gctgacgcgc cctgacgggc ttgtctgctc ccggcatccg cttacagaca agctgtgacc |
| 5878 | gtctccggga gctgcatgtg tcagaggttt tcaccgtcat caccgaaacg cgcga |

TABLE 20
unannotated DNA sequence of pM160G12:URP12

LOCUS pM160G12 5932 CIRCULAR
!M160-G12_URPl-2 5926 bp DNA circular
ORIGIN

| | |
|---|---|
| 1 | GACGAAAGGG CCTCGTGATA CGCCTATTTT TATAGGTTAA TGTCATGATA ATAATGGTTT |
| 61 | CTTAGACGTC AGGTGGCACT TTTCGGGGAA ATGTGCGCGG AACCCCTATT TGTTTATTTT |
| 121 | TCTAAATACA TTCAAATATG TATCCGCTCA TGAGACAATA ACCCTGATAA ATGCTTCAAT |
| 181 | AATATTGAAA AAGGAAGAGT ATGAGTATTC AACATTTCCG TGTCGCCCTT ATTCCCTTTT |
| 241 | TTGCGGCATT TTGCCTTCCT GTTTTTGCTC ACCCAGAAAC GCTGGTGAAA GTAAAAGATG |
| 301 | CTGAAGATCA GTTGGGTGCC CGAGTGGGTT ACATCGAACT GGATCTCAAC AGCGGTAAGA |
| 361 | TCCTTGAGAG TTTTCGCCCC GAAGAACGTT TTCCAATGAT GAGCACTTTT AAAGTTCTGC |
| 421 | TATGTGGCGC GGTATTATCC CGTATTGACG CCGGGCAAGA GCAACTCGGT CGCCGCATAC |
| 481 | ACTATTCTCA GAATGACTTG GTTGAGTACT CACCAGTCAC AGAAAAGCAT CTTACGGATG |
| 541 | GCATGACAGT AAGAGAATTA TGCAGTGCTG CCATAACCAT GAGTGATAAC ACTGCGGCCA |
| 601 | ACTTACTTCT GACAACGATC GGAGGACCGA AGGAGCTAAC CGCTTTTTTG CACAACATGG |
| 661 | GGGATCATGT AACTCGCCTT GATCGTTGGG AACCGGAGCT GAATGAAGCC ATACCAAACG |
| 721 | ACGAGCGTGA CACCACGATG CCTGTAGCAA TGGCAACAAC GTTGCGCAAA CTATTAACTG |
| 781 | GCGAACTACT TACTCTAGCT TCCCGGCAAC AATTAATAGA CTGGATGGAG GCGGATAAAG |
| 841 | TTGCAGGACC ACTTCTGCGC TCGGCCCTTC CGGCTGGCTG GTTTATTGCT GATAAATCTG |
| 901 | GAGCCGGTGA GCGTGGGTCT CGCGGTATCA TTGCAGCACT GGGGCCAGAT GGTAAGCCCT |
| 961 | CCCGTATCGT AGTTATCTAC ACGACGGGGA GTCAGGCAAC TATGGATGAA CGAAATAGAC |
| 1021 | AGATCGCTGA GATAGGTGCC TCACTGATTA AGCATTGGTA ACTGTCAGAC CAAGTTTACT |
| 1081 | CATATATACT TTAGATTGAT TTAAAACTTC ATTTTTAATT TAAAAGGATC TAGGTGAAGA |
| 1141 | TCCTTTTTGA TAATCTCATG ACCAAAATCC CTTAACGTGA GTTTTCGTTC CACTGAGCGT |
| 1201 | CAGACCCCGT AGAAAAGATC AAAGGATCTT CTTGAGATCC TTTTTTTCTG CGCGTAATCT |
| 1261 | GCTGCTTGCA AACAAAAAAA CCACCGCTAC CAGCGGTGGT TTGTTTGCCG GATCAAGAGC |
| 1321 | TACCAACTCT TTTTCCGAAG GTAACTGGCT TCAGCAGAGC GCAGATACCA AATACTGTTC |
| 1381 | TTCTAGTGTA GCCGTAGTTA GGCCACCACT TCAAGAACTC TGTAGCACCG CCTACATACC |
| 1441 | TCGCTCTGCT AATCCTGTTA CCAGTGGCTG CTGCCAGTGG CGATAAGTCG TGTCTTACCG |
| 1501 | GGTTGGACTC AAGACGATAG TTACCGGATA AGGCGCAGCG GTCGGGCTGA ACGGGGGGTT |
| 1561 | CGTGCATACA GCCCAGCTTG GAGCGAACGA CCTACACCGA ACTGAGATAC CTACAGCGTG |
| 1621 | AGCTATGAGA AAGCGCCACG CTTCCCGAAG GGAGAAAGGC GGACAGGTAT CCGGTAAGCG |
| 1681 | GCAGGGTCGG AACAGGAGAG CGCACGAGGG AGCTTCCAGG GGGAAACGCC TGGTATCTTT |
| 1741 | ATAGTCCTGT CGGGTTTCGC CACCTCTGAC TTGAGCGTCG ATTTTTGTGA TGCTCGTCAG |
| 1801 | GGGGGCGGAG CCTATGGAAA AACGCCAGCA ACGCGGCCTT TTTACGGTTC CTGGCCTTTT |
| 1861 | GCTGGCCTTT TGCTCACATG TTCTTTCCTG CGTTATCCCC TGATTCTGTG GATAACCGTA |
| 1921 | TTACCGCCTT TGAGTGAGCT GATACCGCTC GCCGCAGCCG AACGACCGAG CGCAGCGAGT |
| 1981 | CAGTGAGCGA GGAAGCGGAA GAGCGCCCAA TACGCAAACC GCCTCTCCCC GCGCGTTGGC |
| 2041 | CGATTCATTA ATGCAGCTGG CACGACAGGT TTCCCGACTG GAAAGCGGGC AGTGAGCGCA |
| 2101 | ACGCAATTAA TGTGAGTTAG CTCACTCATT AGGCACCCCA GGCTTTACAC TTTATGCTTC |
| 2161 | CGGCTCGTAT GTTGTGTGGA ATTGTGAGCG GATAACAATT TCACACAGGA AACAGCTATG |
| 2221 | ACCATGATTA CGCCAAGCTT TGGAGCCTTT TTTTTGGAGA TTTTCAACAT GAAAAAATTA |
| 2281 | TTATTCGCAA TTCCTTTAGT TGTTCCTTTC TATTCTCACA GTGCACAAGA CATCCAGATG |
| 2341 | ACCCAGTCTC CATCCTTCCT GTCTGCATCT GTAGGAGACA GAGTCACCAT CACTTGCCGG |
| 2401 | GCCAGTCAGG GCATTAGCAG TTATTTAGCC TGGTATCAGC AAAAACCAGG GAAAGCCCCT |
| 2461 | AAGCTCCTGA TCTATGCTGC ATCCACTTTG CAAAGTGGGG TCCCATCAAG GTTCAGCGGC |
| 2521 | AGTGGATCTG GGACAGAATT CACTCTCACA ATCAGCAGCC TGCAGCCTGA AGATTTTGCA |
| 2581 | ACTTATTACT GTCAACAGCT TAATAGTTAC CCTCTCACTT TCGGCGGAGG GACCAAGGTG |
| 2641 | GAGATCAAAC GAACTGTGGC TGCACCATCT GTCTTCATCT TCCCGCCATC TGATGAGCAG |
| 2701 | TTGAAATCTG GAACTGCCTC TGTTGTGTGC CTGCTGAATA ACTTCTATCC CAGAGAGGCC |
| 2761 | AAAGTACAGT GGAAGGTGGA TAACGCCCTC CAATCGGGTA ACTCCCAGGA GAGTGTCACA |
| 2821 | GAGCAGGACA GCAAGGACAG CACCTACAGC CTCAGCAGCA CCCTGACGCT GAGCAAAGCA |
| 2881 | GACTACGAGA AACACAAAGT CTACGCCTGC GAAGTCACCC ATCAGGGCCT GAGTTCACCG |
| 2941 | GTGACAAAGA GCTTCAACAG GGGAGAGTGT GGTACCGCTT CTACTGCCAC CACTGGTCCT |
| 3001 | GCTCCTACTG AATCCCCTGC TCCGGGTCCT TCTGGTGCTC CTGGCTCTAC TGGTCCTGGT |
| 3061 | GAGCCGAGTC CTAGTGAAGC CACCACTCCT GCTCCTGGTA CTCCGTCTCC TACTTCCGGC |
| 3121 | CCTGAGGGTG CTACCGGTGA AGGTGCTGCC GGCGAGCCTC CGCCTTCTGG TACTGGTCCT |
| 3181 | GCTGCTGCTT CTCCTGGTGG CCCGCCTGGT GAAACTGCCA GTGGTCCTGC TAGTACTGGT |
| 3241 | GGCACCGGTT CTACTGCTAC TCCTACTTCC TCTGCTGAGT CTCCGGCCGG TACTGAACCT |
| 3301 | AGTAGTGGTC CTGAGGAACC TTCTGAGGAA CCGGCTACTG AGGCTGCTGG CGGTACTACT |
| 3361 | ACCGAAGCCT CCGGTACTAC TGGTACTTCT GAGACCGCTT CTCCTGAAGA GGAAGCTCCT |
| 3421 | AGTGCTAGTG CCACTCCTGG CGAGACTGGT ACTCCGGAAC CTGGTGCTCC TGGTACTCCT |
| 3481 | CCGACTGGCG CTGGTTCTTC CGAGCCTGCT GGTTCTGGTG GCTCTGGTAG TACTCCTGCC |
| 3541 | AGTGAGGCTT CTTCCTCTCC TGCTTCTACT GCTGGTAGTA GTACCGCCGG TGAGGAACCG |
| 3601 | CCTCCTTAAT AAGGCGCGCC TAACCATCTA TTTCAAGGAA CAGTCTTAAT GAAAAAGCTT |
| 3661 | TTATTCATGA TCCCGTTAGT TGTACCGTTC GTGGCCCAGC CGGCCATGGC CGAAGTTCAA |
| 3721 | TTGTTAGAGT CTGGTGGCGG TCTTGTTCAG CCTGGTGGTT CTTTACGTCT TTCTTGCGCT |
| 3781 | GCTTCCGGAT TCACTTTCTC TCATTACCTT ATGACTTGGG TTCGCCAAGC TCCTGGTAAA |
| 3841 | GGTTTGGAGT GGGTTTCTTA TATCTCTCCT TCTGGTGGCC ATACTATTTA TGCTGACTCC |
| 3901 | GTTAAAGGTC GCTTCACTAT CTCTAGAGAC AACTCTAAGA ATACTCTCTA CTTGCAGATG |
| 3961 | AACAGCTTAA GGGCTGAGGA CACGGCCGTG TATTACTGTG CGAGAGTGGC CCGGGGGATA |
| 4021 | GCAGCTCGAT CGCGAACCAG CTACTTTGAC TACTGGGGCC AGGGAACCCT GGTCACCGTC |
| 4081 | TCAAGCGCCT CCACCAAGGG CCCATCGGTC TTCCCGCTAG CACCCTCCTC CAAGAGCACC |
| 4141 | TCTGGGGGCA CAGCGGCCCT GGGCTGCCTG GTCAAGGACT ACTTCCCCGA ACCGGTGACG |
| 4201 | GTGTCGTGGA ACTCAGGCGC CCTGACCAGC GGCGTCCACA CCTTCCCGGC TGTCCTACAG |
| 4261 | TCTAGCGGAC TCTACTCCCT CAGCAGCGTA GTGACCGTGC CCTCTTCTAG CTTGGGCACC |
| 4321 | CAGACCTACA TCTGCAACGT GAATCACAAG CCCAGCAACA CCAAGGTGGA CAAGAAAGTT |
| 4381 | GAGCCCAAAT CTTGTGCGGC CGCTTCTCCT GCTACTGCTT CCGCTTCTAC TGCCCCGGCT |
| 4441 | ACTGCTACCC CTGAGTCTGC TGAAGGCGCC ACTACTGAGA CTCCTACCAC TGAAACTCCT |
| 4501 | GCTGAGAGTG CTAGTGGTCC GCCTGCTCCT TCTGAATCCG CCACTGAGGA ATCTGGTGAG |
| 4561 | GCTTCTACCA GTAGTACTGC TGAAGAGGGT CCTGCTGAAC CGGGCTCTCC TGCCCCTACT |
| 4621 | CCTGCTGCTA CTCCGGCTGA GACCTCCTCT GAACCTCCTG AGGAACCTGG TGGTGCCGGT |
| 4681 | ACTCCGGCTG GCACTACTAC CGGTGCTGAG ACTGAATCTG CTACTGAGGG TGGTGCCAGT |
| 4741 | AGTGCTCCTG CTTCTCCTAC TGGCGGTGCT CCTTCCTCTG GTGAAACCAC TACTGAGGGT |
| 4801 | GGCCCGGCCG GTCCTGCTCC TGCTACTGCT GCCCCTACCG GTGGTGGCGC TGGTGGTGAA |
| 4861 | GGTTCTGCTG GCGGTGGTAC TGGTGAGGAA GGCGGTGGTG GTGCTCCGGA GGGCAGTGGT |
| 4921 | GGTGGTCCTG AAGGCCCTAC TCCTGCCACT GAGGCTAGTC CGGAAGGTGC TCCTCCTGGT |
| 4981 | TCTACCTCCA CTTCTGGTCC TGGCGAGGCT GCCTCTCCGA CTAGTAGTCC TGGTTAATGA |
| 5041 | TAAAACGCGT GATGAGAATT CACTGGCCGT CGTTTTACAA CGTCGTGACT GGGAAAACCC |
| 5101 | TGGCGTTACC CAACTTAATC GCCTTGCAGC ACATCCCCCT TTCGCCAGCT GGCGTAATAG |
| 5161 | CGAAGAGGCC CGCACCGATC GCCCTTCCCA ACAGTTGCGC AGCCTGAATG GCGAATGGCG |
| 5221 | CCTGATGCGG TATTTTCTCC TTACGCATCT GTGCGGTATT TCACACCGCA TACGTCAAAG |
| 5281 | CAACCATAGT ACGCGCCCTG TAGCGGCGCA TTAAGCGCGG CGGGTGTGGT GGTTACGCGC |
| 5341 | AGCGTGACCG CTACACTTGC CAGCGCCTTA GCGCCCGCTC CTTTCGCTTT CTTCCCTTCC |
| 5401 | TTTCTCGCCA CGTTCGCCGG CTTTCCCCGT CAAGCTCTAA ATCGGGGGCT CCCTTTAGGG |
| 5461 | TTCCGATTTA GTGCTTTACG GCACCTCGAC CCCAAAAAAC TTGATTTGGG TGATGGTTCA |
| 5521 | CGTAGTGGGC CATCGCCCTG ATAGACGGTT TTTCGCCCTT TGACGTTGGA GTCCACGTTC |
| 5581 | TTTAATAGTG GACTCTTGTT CCAAACTGGA ACAACACTCA ACTCTATCTC GGGCTATTCT |
| 5641 | TTTGATTTAT AAGGGATTTT GCCGATTTCG GTCTATTGGT TAAAAAATGA GCTGATTTAA |
| 5701 | CAAAAATTTA ACGCGAATTT TAACAAAATA TTAACGTTTA CAATTTTATG GTGCAGTCTC |
| 5761 | AGTACAATCT GCTCTGATGC CGCATAGTTA AGCCAGCCCC GACACCCGCC AACACCCGCT |
| 5821 | GACGCGCCCT GACGGGCTTG TCTGCTCCCG GCATCCGCTT ACAGACAAGC TGTGACCGTC |
| 5881 | TCCGGGAGCT GCATGTGTCA GAGGTTTTCA CCGTCATCAC CGAAACGCGC GA |

TABLE 21
Examples of human Glycine Rich Sequences (GRS)
for use in designing human-specific URPs

| | | GRS | Gene | Hydro- | |
|---|---|---|---|---|---|
| Accession | Gly (%) | length | length | phobics | Predicted Function |
| NP_000217 | 62 | 135 | 622 | Yes | keratin 9 |
| NP_631961 | 61 | 73 | 592 | Yes | TBP-associated |
| | | | | | factor 15 isoform 1 |
| NP_476429 | 65 | 70 | 629 | Yes | keratin 3 |
| NP_000418 | 70 | 66 | 316 | Yes | loricrin, cell envelope |
| NP_056932 | 60 | 66 | 638 | Yes | cytokeratin 2 |

TABLE 22
Additional examples of human Glycine Rich Sequences for use in designing human-specific URPs

| | | Number of amino |
|---|---|---|
| Accession | Sequences | acids |
| NP_006228 | GPGGGGGPGGGGGPGGGGPGGGGGGGPGGGGGGPGGG | 37 |
| NP_787059 | GAGGGGGGGGGGGGGSGGGGGGGGAGAGGAGAG | 33 |
| NP_009060 | GGGSGSGGAGGGSGGGSGSGGGGGGAGGGGGG | 32 |
| NP_031393 | GDGGGAGGGGGGGGSGGGGSGGGGGGG | 27 |
| NP_005850 | GSGSGSGGGGGGGGGGGGSGGGGGG | 25 |
| NP_061856 | GGGRGGRGGGRGGGGRGGGRGGG | 22 |
| NP_787059 | GAGGGGGGGGGGGGGSGGGGGGGGAGAGGAGAG | 33 |
| NP_009060 | GGGSGSGGAGGGSGGGSGSGGGGGGAGGGGGG | 32 |
| NP_031393 | GDGGGAGGGGGGGGSGGGGSGGGGGGG | 27 |
| NP_115818 | GSGGSGGSGGGPGPGPGGGGG | 21 |
| XP_376532 | GEGGGGGGEGGGAGGGSG | 18 |
| NP_065104 | GGGGGGGGDGGG | 12 |

GGGSGSGGAGGGSGGGSGSGGGGGGAGGGGGGSSGGGSGTAGGHSG
POU domain, class 4, transcription factor 1 [Homo sapiens]
GPGGGGGPGGGGGPGGGGPGGGGGGGPGGGGGGPGGG
YEATS domain containing 2 [Homo sapiens]
GGSGAGGGGGGGGGGGSGSGGGGSTGGGGGTAGGG
AT rich interactive domain IB (SWI1-like) isoform 3; BRG1-binding protein ELD/OSA1; Eld
(eyelid)/Osa protein [Homo sapiens]
GAGGGGGGGGGGGGGSGGGGGGGGAGAGGAGAG
AT rich interactive domain IB (SWI1-like) isoform 2; BRG1-binding protein ELD/OSA1; Eld
(eyelid)/Osa protein [Homo sapiens]
GAGGGGGGGGGGGGGSGGGGGGGGAGAGGAGAG
AT rich interactive domain IB (SWI1-like) isoform 1; BRG1-binding protein
ELD/OSA1; Eld (eyelid)/Osa protein [Homo sapiens]
GAGGGGGGGGGGGGGSGGGGGGGGAGAGGAGAG
purine-rich element binding protein A; purine-rich single-stranded DNA-binding protein
alpha; transcriptional activator protein PUR-alpha [Homo sapiens]
GHPGSGSGSGGGGGGGGGGGGSGGGGGGAPGG
regulatory factor X1; trans-acting regulatory factor 1; enhancer factor C; MHC class II
regulatory factor RFX [Homo sapiens]
GGGGSGGGGGGGGGGGGGGSGSTGGGGSGAG
bromo domain-containing protein disrupted in leukemia [Homo sapiens]
GGRGRGGRGRGSRGRGGGGTRGRGRGRGGRG
unknown protein [Homo sapiens]
GSGGSGGSGGGPGPGPGGGGGPSGSGSGPG
PREDICTED: hypothetical protein XP_059256 [Homo sapiens]
GGGGGGGGGGGRGGGGRGGGRGGGGEGGG
zinc finger protein 281; ZNP-99 transcription factor [Homo sapiens]
GGGGTGSSGGSGSGGGGSGGGGGGGSSG
RNA binding protein (autoantigenic, hnRNP-associated with lethal yellow) short isoform;
RNA-binding protein (autoantigenic); RNA- binding protein (autoantigenic, hnRNP-
associated with lethal yellow) [Homo sapiens]
GDGGGAGGGGGGGGSGGGGSGGGGGGG
signal recognition particle 68 kDa [Homo sapiens]
GGGGGGGSGGGGGSGGGGSGGGRGAGG
KIAA0265 protein [Homo sapiens]
GGGAAGAGGGGSGAGGGSGGSGGRGTG
engrailed homolog 2; Engrailed-2 [Homo sapiens]
GAGGGRGGGAGGEGGASGAEGGGGAGG
RNA binding protein (autoantigenic, hnRNP-associated with lethal yellow) long
isoform; RNA-binding protein (autoantigenic);
RNA-binding protein (autoantigenic, hnRNP-associated with lethal yellow) [Homo sapiens]
GDGGGAGGGGGGGGSGGGGSGGGGGGG
androgen receptor; dihydrotestosterone receptor [Homo sapiens]
GGGGGGGGGGGGGGGGGGGGGGGEAG
homeo box D11; homeo box 4F; Hox-4.6, mouse, homolog of; homeobox pro-tein
Hox-D11 [Homo sapiens]
GGGGGGSAGGGSSGGGPGGGGGGAGG
frizzled 8; frizzled (Drosophila) homolog 8 [Homo sapiens]
GGGGGPGGGGGGGPGGGGGPGGGGG
ocular development-associated gene [Homo sapiens]
GRGGAGSGGAGSGAAGGTGSSGGGG
homeo box B3; homeo box 2G; homeobox protein Hox-B3 [Homo sapiens]
GGGGGGGGGGGSGGSGGGGGGGGGG
chromosome 2 open reading frame 29 [Homo sapiens]
GGSGGGRGGASGPGSGSGGPGGPAG
DKFZP564F0522 protein [Homo sapiens]
GGHHGDRGGGRGGRGGRGGRGGRAG
PREDICTED: similar to Homeobox even-skipped homolog protein 2 (EVX-2) [Homo sapiens]
GSRGGGGGGGGGGGGGGGGAGAGGG
ras homolog gene family, member U; Ryu GTPase; Wnt-1 responsive Cdc42 homolog;
2310026M05Rik; GTP-binding protein like 1; CDC42-like GTPase [Homo sapiens]
GGRGGRGPGEPGGRGRAGGAEGRG
scratch 2 protein; transcriptional repressor scratch 2; scratch (drosophila homolog) 2, zinc
finger protein [Homo sapiens]
GGGGGDAGGSGDAGGAGGRAGRAG
nucleolar protein family A, member 1; GAR1 protein [Homo sapiens]
GGGRGGRGGGRGGGGRGGGRGGG
keratin 1; Keratin-1; cytokeratin 1; hair alpha protein [Homo sapiens]
GGSGGGGGGS SGGRGSGGGS SGG
hypothetical protein FLJ31413 [Homo sapiens]
GSGPGTGGGGSGSGGGGGGSGGG
one cut domain, family member 2; onecut 2 [Homo sapiens]
GARGGGSGGGGGGGGGGGGGGPG
POU domain, class 3, transcription factor 2 [Homo sapiens]
GGGGGGGGGGGGGGGGGGGGGDG
PREDICTED: similar to THO complex subunit 4 (Tho4) (RINA and export factor
binding protein 1) (REF1-I) (Ally of AML-1 and LEF-1) (Aly/REF) [Homo sapiens]
GGTRGGTRGGTRGGDRGRGRGAG
PREDICTED: similar to THO complex subunit 4 (Tho4) (RNA and export factor binding
protein 1) (REF1-I) (Ally of AML-1 and LEF-1) (Aly/REF) [Homo sapiens]
GGTRGGTRGGTRGGDRGRGRGAG
POU domain, class 3, transcription factor 3 [Homo sapiens]
GAGGGGGGGGGGGGGGAGGGGGG
nucleolar protein family A, member 1; GAR1 protein [Homo sapiens]
GGGRGGRGGGRGGGGRGGGRGGG
fibrillarin; 34-kD nucleolar scleroderma antigen; RNA, U3 small nucleolar interacting
protein 1 [Homo sapiens]
GRGRGGGGGGGGGGGGGRGGGG
zinc finger protein 579 [Homo sapiens]
GRGRGRGRGRGRGRGRGRGGAG
calpain, small subunit 1; calcium-activated neutral proteinase; calpain, small polypeptide;
calpain 4, small subunit (30 K); calcium-dependent protease, small subunit
[Homo sapiens]
GAGGGGGGGGGGGGGGGGGGGG
keratin 9 [Homo sapiens]
GGGSGGGHSGGSGGGHSGGSGG
forkhead box D1; forkhead-related activator 4;
Forkhead, [Drosophila, homolog-like 8; forkhead (Drosophila)-like 8 [Homo sapiens]
GAGAGGGGGGGGAGGGGSAGSG
PREDICTED: similar to RIKEN cDNA C230094B15 [Homo sapiens]
GGPGTGSGGGGAGTGGGAGGPG
GGGGGGGGGAGGAGGAGSAGGG
cadherin 22 precursor; ortholog of rat PB-cadherin [Homo sapiens]
GGDGGGSAGGGAGGGSGGGAG
AT-binding transcription factor 1; AT motif-binding factor 1 [Homo sapiens]
GGGGGGSGGGGGGGGGGGGGG
eomesodermin; t box, brain, 2; eomesodermin (Xenopus laevis) homolog [Homo sapiens]
GPGAGAGSGAGGSSGGGGGPG
phosphatidylinositol transfer protein, membrane-associated 2; PYK2 N-terminal
domain-interacting receptor 3; retinal degeneration B alpha 2 (Drosophila) [Homo sapiens]
GGGGGGGGGGGSSGGGGSSGG
sperm associated antigen 8 isoform 2; sperm membrane protein 1 [Homo sapiens]
GSGSGPGPGSGPGSGPGHGSG
PREDICTED: RNA binding motif protein 27 [Homo sapiens]
GPGPGPGPGPGPGPGPGPGPG
API gamma subunit binding protein 1 isoform 1; gamma-synergin; adaptor-related
protein complex 1 gamma subunit-binding protein 1 [Homo sapiens]
GAGSGGGGAAGAGAGSAGGGG
API gamma subunit binding protein 1 isoform 2; gamma-synergin; adaptor-related
protein complex 1 gamma subunit-binding protein 1 [Homo sapiens]
GAGSGGGGAAGAGAGSAGGGG
ankyrin repeat and sterile alpha motif domain containing 1; ankyrin repeat and SAM
domain containing 1 [Homo sapiens]
GGGGGGGSGGGGGGSGGGGGG
methyl-CpG binding domain protein 2 isoform 1 [Homo sapiens]
GRGRGRGRGRGRGRGRGRGRG
triple functional domain (PTPRF interacting) [Homo sapiens]
GGGGGGGSGGSGGGGGSGGGG
forkhead box D3 [Homo sapiens
GGEEGGASGGGPGAGSGSAGG
sperm associated antigen 8 isoform 1; sperm membrane protein 1 [Homo sapiens]
GSGSGPGPGSGPGSGPGHGSG
methyl-CpG binding domain protein 2 testis-specific isoform [Homo sapiens]
GRGRGRGRGRGRGRGRGRGRG
cell death regulator aven; programmed cell death 12 [Homo sapiens]
GGGGGGGGDGGGRRGRGRGRG
regulator of nonsense transcripts 1; delta helicase; up-frameshift mutation 1 homolog
(S. cerevisiae); nonsense mRNA reducing factor 1; yeast Upflp homolog [Homo sapiens]
GGPGGPGGGGAGGPGGAGAG
small conductance calcium-activated potassium channel protein 2 isoform a;
apamin-sensitive small-conductance Ca2+-activated potassium channel [Homo sapiens]
GTGGGGSTGGGGGGGGSGHG
SRY (sex determining region Y)-box 1; SRY-related HMG-box gene 1
[Homo uz, 1/43 sapiens]
GPAGAGGGGGGGGGGGGGGG
transcription factor 20 isoform 2; stromelysin-1 platelet-derived growth factor-responsive
element binding protein; stromelysin 1 PDGF-responsive element-binding protein;
SPRE-binding protein; nuclear factor SPBP [Homo sapiens]
GGTGGSSGSSGSGSGGGRRG
transcription factor 20 isoform 1; stromelysin-1 platelet-derived growth factor-responsive
element binding protein; stromelysin 1 PDGF-responsive element-binding protein;
SPRE-binding protein; nuclear factor SPBP [Homo sapiens]
GGTGGSSGSSGSGSGGGRRG
Ras-interacting protein 1 [Homo sapiens]
GSGTGTTGSSGAGGPGTPGG
BMP-2 inducible kinase isoform b [Homo sapiens]
GGSGGGAAGGGAGGAGAGAG
BMP-2 inducible kinase isoform a [Homo sapiens]
GGSGGGAAGGGAGGAGAGAG
forkhead box C1; forkhead-related activator 3;
Forkhead, drosophila, homolog-like 7; forkhead (Drosophila)-like 7;
iridogoniodysgenesis type 1 [Homo sapiens]
GS SGGGGGGAGAAGGAGGAG
splicing factor p54; arginine-rich 54 kDa nuclear protein [Homo sapiens]
GPGPSGGPGGGGGGGGGGGG
v-maf musculoaponeurotic fibrosarcoma oncogene homolog; Avian musculoaponeurotic
fibrosarcoma (MAF) protooncogene; v-maf musculo-aponeurotic fibrosarcoma (avian)
oncogene homolog [Homo sapiens]
GGGGGGGGGGGGGGAAGAGG
small nuclear ribonucleoprotein D1 polypeptide 16 kDa; snRNP core protein D1; Sm-D
autoantigen; small nuclear ribonucleoprotein D1 polypeptide (16 kD) [Homo sapiens]
GRGRGRGRGRGRGRGRGRGG
hypothetical protein H41 [Homo sapiens]
GSAGGSSGAAGAAGGGAGAG

The application's sequence listing, which the Patent Office published only in electronic form, follows.

SEQUENCE LISTING (2581 sequences)

SEQ ID NO: 1 - protein, 619 aa, Homo sapiens
GCLTQLYENAFFRGGDVASMYTPNAQYCQMRCTFHPRCLLFSFLPASSINDMEKRFGCFLKDSVTGTLPKVHRTGAVSGHSLKQCGHQISACHRDIYKGVDMRGVNFNVSKVSSVEECQKRCTSNIRCQFFSYATQTFHKAEYRNNCLLKYSPGGTPTAIKVLSNVESGFSLKPCALSEIGCHMNIFQHLAFSDVDVARVLTPDAFVCRTICTYHPNCLFFTFYTNVWKIESQRNVCLLKTSESGTPSSSTPQENTISGYSLLTCKRTLPEPCHSKIYPGVDFGGEELNVTFVKGVNVCQETCTKMIRCQFFTYSLLPEDCKEEKCKCFLRLSMDGSPTRIAYGTQGSSGYSLRLCNTGDNSVCTTKTSTRIVGGTNSSWGEWPWQVSLQVKLTAQRHLCGGSLIGHQWVLTAAHCFDGLPLQDVWRIYSGILNLSDITKDTPFSQIKEIIIHQNYKVSEGNHDIALIKLQAPLNYTEFQKPICLPSKGDTSTIYTNCWVTGWGFSKEKGEIQNILQKVNIPLVTNEECQKRYQDYKITQRMVCAGYKEGGKDACKGDSGGPLVCKHNGMWRLVGITSWGEGCARREQPGVYTKVAEYMDWILEKTQSSDGKAQMQSPA

SEQ ID NO: 2 - protein, 638 aa, Homo sapiens
MILFKQATYFISLFATVSCGCLTQLYENAFFRGGDVASMYTPNAQYCQMRCTFHPRCLLFSFLPASSINDMEKRFGCFLKDSVTGTLPKVHRTGAVSGHSLKQCGHQISACHRDIYKGVDMRGVNFNVSKVSSVEECQKRCTSNIRCQFFSYATQTFHKAEYRNNCLLKYSPGGTPTAIKVLSNVESGFSLKPCALSEIGCHMNIFQHLAFSDVDVARVLTPDAFVCRTICTYHPNCLFFTFYTNVWKIESQRNVCLLKTSESGTPSSSTPQENTISGYSLLTCKRTLPEPCHSKIYPGVDFGGEELNVTFVKGVNVCQETCTKMIRCQFFTYSLLPEDCKEEKCKCFLRLSMDGSPTRIAYGTQGSSGYSLRLCNTGDNSVCTTKTSTRIVGGTNSSWGEWPWQVSLQVKLTAQRHLCGGSLIGHQWVLTAAHCFDGLPLQDVWRIYSGILNLSDITKDTPFSQIKEIIIHQNYKVSEGNHDIALIKLQAPLNYTEFQKPICLPSKGDTSTIYTNCWVTGWGFSKEKGEIQNILQKVNIPLVTNEECQKRYQDYKITQRMVCAGYKEGGKDACKGDSGGPLVCKHNGMWRLVGITSWGEGCARREQPGVYTKVAEYMDWILEKTQSSDGKAQMQSPA

SEQ ID NO: 3 - DNA, 2252 bp, Homo sapiens
  source 1..2252: mol_type = genomic DNA
agaacagcttgaagaccgttcatttttaagtgacaagagactcacctccaagaagcaattgtgttttcagaatgattttattcaagcaagcaacttatttcatttccttgtttgctacagtttcctgtggatgtctgactcaactctatgaaaacgccttcttcagaggtggggatgtagcttccatgtacaccccaaatgcccaatactgccagatgaggtgcacattccacccaaggtgtttgctattcagttttcttccagcaagttcaatcaatgacatggagaaaaggtttggttgcttcttgaaagatagtgttacaggaaccctgccaaaagtacatcgaacaggtgcagtttctggacattccttgaagcaatgtggtcatcaaataagtgcttgccatcgagacatttataaaggagttgatatgagaggagtcaattttaatgtgtctaaggttagcagtgttgaagaatgccaaaaaaggtgcaccagtaacattcgctgccagtttttttcatatgccacgcaaacatttcacaaggcagagtaccggaacaattgcctattaaagtacagtcccggaggaacacctaccgctataaaggtgctgagtaacgtggaatctggattctcactgaagccctgtgccctttcagaaattggttgccacatgaacatcttccagcatcttgcgttctcagatgtggatgttgccagggttctcactccagatgcttttgtgtgtcggaccatctgcacctatcaccccaactgcctcttctttacattctatacaaatgtatggaaaatcgagtcacaaagaaatgtttgtcttcttaaaacatctgaaagtggcacaccaagttcctctactcctcaagaaaacaccatatctggatatagccttttaacctgcaaaagaactttacctgaaccctgccattctaaaatttacccgggagttgactttggaggagaagaattgaatgtgacttttgttaaaggagtgaatgtttgccaagagacttgcacaaagatgattcgctgtcagtttttcacttattctttactcccagaagactgtaaggaagagaagtgtaagtgtttcttaagattatctatggatggttctccaactaggattgcgtatgggacacaagggagctctggttactctttgagattgtgtaacactggggacaactctgtctgcacaacaaaaacaagcacacgcattgttggaggaacaaactcttcttggggagagtggccctggcaggtgagcctgcaggtgaagctgacagctcagaggcacctgtgtggagggtcactcataggacaccagtgggtcctcactgctgcccactgctttgatgggcttcccctgcaggatgtttggcgcatctatagtggcattttaaatctgtcagacattacaaaagatacacctttctcacaaataaaagagattattattcaccaaaactataaagtctcagaagggaatcatgatatcgccttgataaaactccaggctcctttgaattacactgaattccaaaaaccaatatgcctaccttccaaaggtgacacaagcacaatttataccaactgttgggtaaccggatggggcttctcgaaggagaaaggtgaaatccaaaatattctacaaaaggtaaatattcctttggtaacaaatgaagaatgccagaaaagatatcaagattataaaataacccaacggatggtctgtgctggctataaagaagggggaaaagatgcttgtaagggagattcaggtggtcccttagtttgcaaacacaatggaatgtggcgtttggtgggcatcaccagctggggtgaaggctgtgcccgcagggagcaacctggtgtctacaccaaagtcgctgagtacatggactggattttagagaaaacacagagcagtgatggaaaagctcagatgcagtcaccagcatgagaagcagtccagagtctaggcaatttttacaacctgagttcaagtcaaattctgagcctggggggtcctcatctgcaaagcatggagagtggcatcttctttgcatcctaaggacgaaaaacacagtgcactcagagctgctgaggacaatgtctggctgaagcccgctttcagcacgccgtaaccaggggctgacaatgcgaggtcgcaactgagatctccatgactgtgtgttgtgaaataaaatggtgaaagatcaaaaaa

SEQ ID NO: 4 - protein, 638 aa, Mus musculus
MILFNRVGYFVSLFATVSCGCMTQLYKNTFFRGGDLAAIYTPDAQYCQKMCTFHPRCLLFSFLAVTPPKETNKRFGCFMKESITGTLPRIHRTGAISGHSLKQCGHQISACHRDIYKGLDMRGSNFNISKTDNIEECQKLCTNNFHCQFFTYATSAFYRPEYRKKCLLKHSASGTPTSIKSADNLVSGFSLKSCALSEIGCPMDIFQHSAFADLNVSQVITPDAFVCRTICTFHPNCLFFTFYTNEWETESQRNVCFLKTSKSGRPSPPIPQENAISGYSLLTCRKTRPEPCHSKIYSGVDFEGEELNVTFVQGADVCQETCTKTIRCQFFIYSLLPQDCKEEGCKCSLRLSTDGSPTRITYGMQGSSGYSLRLCKLVDSPDCTTKINARIVGGTNASLGEWPWQVSLQVKLVSQTHLCGGSIIGRQWVLTAAHCFDGIPYPDVWRIYGGILSLSEITKETPSSRIKELIIHQEYKVSEGNYDIALIKLQTPLNYTEFQKPICLPSKADTNTIYTNCWVTGWGYTKEQGETQNILQKATIPLVPNEECQKKYRDYVINKQMICAGYKEGGTDACKGDSGGPLVCKHSGRWQLVGITSWGEGCGRKDQPGVYTKVSEYMDWILEKTQSSDVRALETSSA

SEQ ID NO: 5 - DNA, 2472 bp, Mus musculus
  source 1..2472: mol_type = genomic DNA
agaccgccctcggtgccatattcagagggcttgaagaccatcttcatgtgaagactccctctcctccagaaccacaacgtgaccatccttccaggatgattttattcaaccgagtgggttattttgtttccttgtttgctaccgtctcctgtgggtgtatgactcaactgtataaaaataccttcttcagaggtggggatctagctgccatctacaccccagatgcccagtactgtcagaagatgtgcacttttcaccccaggtgcctgctgttcagctttctcgccgtgactccacccaaagagacaaataaacggtttggttgcttcatgaaagagagcattacagggactttgccaagaatacaccggacaggggccatttctggtcattctttaaagcagtgtggccatcaaataagtgcttgccaccgagacatatacaaaggacttgatatgagagggtccaactttaatatctctaagaccgacaatattgaagaatgccagaaactgtgcacaaataattttcactgccaatttttcacatatgctacaagtgcattttacagaccagagtaccggaagaagtgcctgctgaagcacagtgcaagcggaacacccaccagcataaagtcagcggacaacctggtgtctggattctcactgaagtcctgtgcgctttcggagataggttgccccatggatattttccagcactctgcctttgcagacctgaatgtaagccaggtcatcacccccgatgcctttgtgtgtcgcaccatctgcaccttccatcccaactgccttttcttcacgttctacacgaatgaatgggagacagaatcacagagaaatgtttgttttcttaagacgtctaaaagtggaagaccaagtccccctattcctcaagaaaacgctatatctggatatagtctcctcacctgcagaaaaactcgccctgaaccctgccattccaaaatttactctggagttgactttgaaggggaagaactgaatgtgaccttcgtgcaaggagcagatgtctgccaagagacttgtacaaagacaatccgctgccagttttttatttactccttactcccccaagactgcaaggaggaggggtgtaaatgttccttaaggttatccacagatggctccccaactaggatcacctatggcatgcaggggagctccggttattctctgagattgtgtaaacttgtggacagccctgactgtacaacaaaaataaatgcacgtattgtgggaggaacaaacgcttctttaggggagtggccatggcaggtcagcctgcaagtgaagctggtatctcagacccatttgtgtggagggtccatcattggtcgccaatgggtactgacagctgcccattgctttgatggaattccctatccagatgtgtggcgtatatatggcggaattcttagtctgtccgagattacgaaagaaacgccttcctcgagaataaaggagcttattattcatcaggaatacaaagtctcagaaggcaattatgatattgccttaataaagcttcagacgcccctgaattatactgaattccaaaaaccaatatgcctgccttccaaagctgacacaaatacaatttataccaactgttgggtgactggatggggctacacgaaggaacaaggtgaaacgcaaaatattctacaaaaggctactattcctttggtaccaaatgaagaatgccagaaaaaatacagagattatgttataaacaagcagatgatctgtgctggctacaaagaaggcggaacagacgcttgtaagggagattccggtggccccttagtctgtaaacacagtggacggtggcagttggtgggtatcaccagctggggtgaaggctgcgcccgcaaggaccaaccaggagtctacaccaaagtttctgagtacatggactggatattggagaagacacagagcagtgatgtaagagctctggagacatcttcagcctgaggaggctgggtaccaaggaggaagaacccagctggctttaccacctgccctcaaggcaaactagagctccaggattctcggctgtaaaatgttgataatggtgtctacctcacatccgtatcattggattgaaaattcaagtgtagatatagttgctgaagacagcgttttgctcaagtgtgtttcctgccttgagtcacaggagctccaatgggagcattacaaagatcaccaagcttgttaggaaagagaatgatcaaagggttttattaggtaatgaaatgtctagatgtgatgcaattgaaaaaaagaccccagattctagcacagtccttgggaccattctcatgtaactgttgactctggacctcagcagatctcagagttacctgtccacttctgacatttgtttattagagcctgatgctattctttcaagtggagcaaaaaaaaaaaaaaa

SEQ ID NO: 6 - protein, 638 aa, Rattus norvegicus
MILFKQVGYFVSLFATVSCGCLSQLYANTFFRGGDLAAIYTPDAQHCQKMCTFHPRCLLFSFLAVSPTKETDKRFGCFMKESITGTLPRIHRTGAISGHSLKQCGHQLSACHQDIYEGLDMRGSNFNISKTDSIEECQKLCTNNIHCQFFTYATKAFHRPEYRKSCLLKRSSSGTPTSIKPVDNLVSGFSLKSCALSEIGCPMDIFQHFAFADLNVSHVVTPDAFVCRTVCTFHPNCLFFTFYTNEWETESQRNVCFLKTSKSGRPSPPIIQENAVSGYSLFTCRKARPEPCHFKIYSGVAFEGEELNATFVQGADACQETCTKTIRCQFFTYSLLPQDCKAEGCKCSLRLSTDGSPTRITYEAQGSSGYSLRLCKVVESSDCTTKINARIVGGTNSSLGEWPWQVSLQVKLVSQNHMCGGSIIGRQWILTAAHCFDGIPYPDVWRIYGGILNLSEITNKTPFSSIKELIIHQKYKMSEGSYDIALIKLQTPLNYTEFQKPICLPSKADTNTIYTNCWVTGWGYTKERGETQNILQKATIPLVPNEECQKKYRDYVITKQMICAGYKEGGIDACKGDSGGPLVCKHSGRWQLVGITSWGEGCARKEQPGVYTKVAEYIDWILEKIQSSKERALETSPA

SEQ ID NO: 7 - DNA, 2513 bp, Rattus norvegicus
  source 1..2513: mol_type = genomic DNA
tgaagactagcttcatgtgaagactccttctcctccagcagcacaaagcaaccatccttccaggatgattttattcaaacaagtgggttattttgtttccttgttcgctacagtttcctgtgggtgtctgtcacaactgtatgcaaataccttcttcagaggtggggatctggctgccatctacaccccggatgcccagcactgtcagaagatgtgcacgtttcaccccaggtgcctgctcttcagcttccttgccgtgagtccaaccaaggagacagataaaaggtttgggtgcttcatgaaagagagcattacagggactttgccaagaatacaccggacaggggccatttctggtcattctttaaaacagtgtggccatcaattaagtgcttgccaccaagacatatacgaaggactggatatgagagggtccaactttaatatatctaagaccgacagtattgaagaatgccagaaactgtgcacaaataatattcactgccaatttttcacatatgctacaaaagcatttcacagaccagagtacaggaagagttgcctgctgaagcgcagttcaagtggaacgcccaccagtataaagccagtggacaacctggtgtctggattctcactgaagtcctgtgctctctcagagatcggttgccccatggatattttccagcactttgcctttgcagacctgaatgtaagccatgtcgtcacccccgatgccttcgtgtgtcgcaccgtttgcaccttccatcccaactgcctcttcttcacattctacacgaatgagtgggagacggaatcacagaggaatgtttgttttcttaagacatctaaaagtggaagaccaagtccccctattattcaagaaaatgctgtatctggatacagtctcttcacctgcagaaaagctcgccctgaaccctgccatttcaagatttactctggagttgccttcgaaggggaagaactgaacgcgaccttcgtgcagggagcagatgcgtgccaagagacttgtacaaagaccatccgctgtcagttttttacttactcattgcttccccaagactgcaaggcagaggggtgtaaatgttccttaaggttatccacggatggctctccaactaggatcacctatgaggcacaggggagctctggttattctctgagactgtgtaaagttgtggagagctctgactgtacgacaaaaataaatgcacgtattgtgggaggaacaaactcttctttaggagagtggccatggcaggtcagcctgcaagtaaagttggtttctcagaatcatatgtgtggagggtccatcattggacgccaatggatactgacggctgcccattgctttgatgggattccctatccagacgtgtggcgtatatatggcgggattcttaatctgtcagagattacaaacaaaacgcctttctcaagtataaaggagcttattattcatcagaaatacaaaatgtcagaaggcagttacgatattgccttaataaagcttcagacaccgttgaattatactgaattccaaaaaccaatatgcctgccttccaaagctgacacaaatacaatttataccaactgctgggtgactggatggggctacacaaaggaacgaggtgagacccaaaatattctacaaaaggcaactattcccttggtaccaaatgaagaatgccagaaaaaatatagagattatgttataaccaagcagatgatctgtgctggctacaaagaaggtggaatagatgcttgtaagggagattccggtggccccttagtttgcaaacatagtggaaggtggcagttggtgggtatcaccagctggggcgaaggctgtgcccgcaaggagcaaccaggagtctacaccaaagttgctgagtacattgactggatattggagaagatacagagcagcaaggaaagagctctggagacatctccagcatgaggaggctgggtactgatggggaagagcccagctggcaccagctttaccacctgccctcaagtcctactagagctccagagttctcttctgcaaaatgtcgatagtggtgtctacctcgcatccttaccataggattaaaagtccaaatgtagacacagttgctaaagacagcgccatgctcaagcgtgcttcctgccttgagcaacaggaacgccaatgagaactatccaaagattaccaagcctgtttggaaataaaatggtcaaaggatttttattaggtagtgaaattaggtagttgtccttggaaccattctcatgtaactgttgactctggacctcagcagatcacagttaccttctgtccacttctgacatttgtgtactggaacctgatgctgttcttccacttggagcaaagaactgagaaacctggttctatccattgggaaaaagagatctttgtaacatttcctttacaataaaaagatgttctacttggacttgaaaaaaaaaaaaaaaaaaaaaaaaaa

SEQ ID NO: 8 - protein, 40 aa, synthetic construct
  REGION 1..40: note = Synthetic polypeptide
  VARIANT 2: note = Ser, Asp, Glu, Thr or Pro
  VARIANT 4: note = Ser, Asp, Glu, Thr or Pro
  VARIANT 6: note = Ser, Asp, Glu, Thr or Pro
  VARIANT 8: note = Ser, Asp, Glu, Thr or Pro
  VARIANT 10: note = Ser, Asp, Glu, Thr or Pro
  VARIANT 12: note = Ser, Asp, Glu, Thr or Pro
  VARIANT 14: note = Ser, Asp, Glu, Thr or Pro
  VARIANT 16: note = Ser, Asp, Glu, Thr or Pro
  VARIANT 18: note = Ser, Asp, Glu, Thr or Pro
  VARIANT 20: note = Ser, Asp, Glu, Thr or Pro
  VARIANT 22: note = Ser, Asp, Glu, Thr or Pro
  VARIANT 24: note = Ser, Asp, Glu, Thr or Pro
  VARIANT 26: note = Ser, Asp, Glu, Thr or Pro
  VARIANT 28: note = Ser, Asp, Glu, Thr or Pro
  VARIANT 30: note = Ser, Asp, Glu, Thr or Pro
  VARIANT 32: note = Ser, Asp, Glu, Thr or Pro
  VARIANT 34: note = Ser, Asp, Glu, Thr or Pro
  VARIANT 36: note = Ser, Asp, Glu, Thr or Pro
  VARIANT 38: note = Ser, Asp, Glu, Thr or Pro
  VARIANT 40: note = Ser, Asp, Glu, Thr or Pro
GXGXGXGXGXGXGXGXGXGXGXGXGXGXGXGXGXGXGXGX

SEQ ID NO: 9 - protein, 39 aa, synthetic construct
  REGION 1..39: note = Synthetic polypeptide
  VARIANT 3: note = Ser, Asp, Glu, Thr or Pro
  VARIANT 6: note = Ser, Asp, Glu, Thr or Pro
  VARIANT 9: note = Ser, Asp, Glu, Thr or Pro
  VARIANT 12: note = Ser, Asp, Glu, Thr or Pro
  VARIANT 15: note = Ser, Asp, Glu, Thr or Pro
  VARIANT 18: note = Ser, Asp, Glu, Thr or Pro
  VARIANT 21: note = Ser, Asp, Glu, Thr or Pro
  VARIANT 24: note = Ser, Asp, Glu, Thr or Pro
  VARIANT 27: note = Ser, Asp, Glu, Thr or Pro
  VARIANT 30: note = Ser, Asp, Glu, Thr or Pro
  VARIANT 33: note = Ser, Asp, Glu, Thr or Pro
  VARIANT 36: note = Ser, Asp, Glu, Thr or Pro
  VARIANT 39: note = Ser, Asp, Glu, Thr or Pro
GGXGGXGGXGGXGGXGGXGGXGGXGGXGGXGGXGGXGGX

SEQ ID NO: 10 - protein, 40 aa, synthetic construct
  REGION 1..40: note = Synthetic polypeptide
  VARIANT 4: note = Ser, Asp, Glu, Thr or Pro
  VARIANT 8: note = Ser, Asp, Glu, Thr or Pro
  VARIANT 12: note = Ser, Asp, Glu, Thr or Pro
  VARIANT 16: note = Ser, Asp, Glu, Thr or Pro
  VARIANT 20: note = Ser, Asp, Glu, Thr or Pro
  VARIANT 24: note = Ser, Asp, Glu, Thr or Pro
  VARIANT 28: note = Ser, Asp, Glu, Thr or Pro
  VARIANT 32: note = Ser, Asp, Glu, Thr or Pro
  VARIANT 36: note = Ser, Asp, Glu, Thr or Pro
  VARIANT 40: note = Ser, Asp, Glu, Thr or Pro
GGGXGGGXGGGXGGGXGGGXGGGXGGGXGGGXGGGXGGGX

SEQ ID NO: 11 - protein, 40 aa, synthetic construct
  REGION 1..40: note = Synthetic polypeptide
  VARIANT 5: note = Ser, Asp, Glu, Thr or Pro
  VARIANT 10: note = Ser, Asp, Glu, Thr or Pro
  VARIANT 15: note = Ser, Asp, Glu, Thr or Pro
  VARIANT 20: note = Ser, Asp, Glu, Thr or Pro
  VARIANT 25: note = Ser, Asp, Glu, Thr or Pro
  VARIANT 30: note = Ser, Asp, Glu, Thr or Pro
  VARIANT 35: note = Ser, Asp, Glu, Thr or Pro
  VARIANT 40: note = Ser, Asp, Glu, Thr or Pro
GGGGXGGGGXGGGGXGGGGXGGGGXGGGGXGGGGXGGGGX

SEQ ID NO: 12 - protein, 315 aa, synthetic construct
  REGION 1..315: note = Synthetic polypeptide
  VARIANT 1..20: note = This region may encompass 1-20 Gly residues
  VARIANT 21: note = Ser, Asp, Glu, Thr or Pro
  VARIANT 22..41: note = This region may encompass 1-20 Gly residues
  VARIANT 42: note = Ser, Asp, Glu, Thr or Pro
  VARIANT 43..62: note = This region may encompass 1-20 Gly residues
  VARIANT 63: note = Ser, Asp, Glu, Thr or Pro
  VARIANT 64..83: note = This region may encompass 1-20 Gly residues
  VARIANT 84: note = Ser, Asp, Glu, Thr or Pro
  VARIANT 85..104: note = This region may encompass 1-20 Gly residues
  VARIANT 105: note = Ser, Asp, Glu, Thr or Pro
  VARIANT 106..125: note = This region may encompass 1-20 Gly residues
  VARIANT 126: note = Ser, Asp, Glu, Thr or Pro
  VARIANT 127..146: note = This region may encompass 1-20 Gly residues
  VARIANT 147: note = Ser, Asp, Glu, Thr or Pro
  VARIANT 148..167: note = This region may encompass 1-20 Gly residues
  VARIANT 168: note = Ser, Asp, Glu, Thr or Pro
  VARIANT 169..188: note = This region may encompass 1-20 Gly residues
  VARIANT 189: note = Ser, Asp, Glu, Thr or Pro
  VARIANT 190..209: note = This region may encompass 1-20 Gly residues
  VARIANT 210: note = Ser, Asp, Glu, Thr or Pro
  VARIANT 211..230: note = This region may encompass 1-20 Gly residues
  VARIANT 231: note = Ser, Asp, Glu, Thr or Pro
  VARIANT 232..251: note = This region may encompass 1-20 Gly residues
  VARIANT 252: note = Ser, Asp, Glu, Thr or Pro
  VARIANT 253..272: note = This region may encompass 1-20 Gly residues
  VARIANT 273: note = Ser, Asp, Glu, Thr or Pro
  VARIANT 274..293: note = This region may encompass 1-20 Gly residues
  VARIANT 294: note = Ser, Asp, Glu, Thr or Pro
  VARIANT 295..314: note = This region may encompass 1-20 Gly residues
  VARIANT 315: note = Ser, Asp, Glu, Thr or Pro
GGGGGGGGGGGGGGGGGGGGXGGGGGGGGGGGGGGGGGGGGXGGGGGGGGGGGGGGGGGGGGXGGGGGGGGGGGGGGGGGGGGXGGGGGGGGGGGGGGGGGGGGXGGGGGGGGGGGGGGGGGGGGXGGGGGGGGGGGGGGGGGGGGXGGGGGGGGGGGGGGGGGGGGXGGGGGGGGGGGGGGGGGGGGXGGGGGGGGGGGGGGGGGGGGXGGGGGGGGGGGGGGGGGGGGXGGGGGGGGGGGGGGGGGGGGXGGGGGGGGGGGGGGGGGGGGXGGGGGGGGGGGGGGGGGGGGXGGGGGGGGGGGGGGGGGGGGX

SEQ ID NO: 13 - protein, 11 aa, synthetic construct
  REGION 1..11: note = Synthetic peptide
RASQSIRNYLN

SEQ ID NO: 14 - protein, 7 aa, synthetic construct
  REGION 1..7: note = Synthetic peptide
AASTLQS

SEQ ID NO: 15 - protein, 9 aa, synthetic construct
  REGION 1..9: note = Synthetic peptide
QQLSGYPHT

SEQ ID NO: 16 - protein, 5 aa, synthetic construct
  REGION 1..5: note = Synthetic peptide
FYYMV

SEQ ID NO: 17 - protein, 17 aa, synthetic construct
  REGION 1..17: note = Synthetic peptide
VIYPSGGITVYADSVKG

SEQ ID NO: 18 - protein, 16 aa, synthetic construct
  REGION 1..16: note = Synthetic peptide
DKWAVMPPYYYYAMDV

SEQ ID NO: 19 - protein, 14 aa, synthetic construct
  REGION 1..14: note = Synthetic peptide
TGTNSDVGNYNLVS

SEQ ID NO: 20 - protein, 7 aa, synthetic construct
  REGION 1..7: note = Synthetic peptide
EVNKRPS

SEQ ID NO: 21 - protein, 11 aa, synthetic construct
  REGION 1..11: note = Synthetic peptide
CSYAGNRNFYV

SEQ ID NO: 22 - protein, 5 aa, synthetic construct
  REGION 1..5: note = Synthetic peptide
WYSMV

SEQ ID NO: 23 - protein, 17 aa, synthetic construct
  REGION 1..17: note = Synthetic peptide
SISPSGGLTNYADSVKG

SEQ ID NO: 24 - protein, 14 aa, synthetic construct
  REGION 1..14: note = Synthetic peptide
HTAARPFYYYYMDV

SEQ ID NO: 25 - protein, 11 aa, synthetic construct
  REGION 1..11: note = Synthetic peptide
SGDKLGDKYAC

SEQ ID NO: 26 - protein, 7 aa, synthetic construct
  REGION 1..7: note = Synthetic peptide
QDSKRPS

SEQ ID NO: 27 - protein, 9 aa, synthetic construct
  REGION 1..9: note = Synthetic peptide
QAWDSSTGV

SEQ ID NO: 28 - protein, 5 aa, synthetic construct
  REGION 1..5: note = Synthetic peptide
WYLMI

SEQ ID NO: 29 - protein, 17 aa, synthetic construct
  REGION 1..17: note = Synthetic peptide
YIYPSGGFTYYADSVKG

SEQ ID NO: 30 - protein, 13 aa, synthetic construct
  REGION 1..13: note = Synthetic peptide
TEGPLSWGYGMDV

SEQ ID NO: 31 - protein, 11 aa, synthetic construct
  REGION 1..11: note = Synthetic peptide
SGDKLGNKYAY

SEQ ID NO: 32 - protein, 7 aa, synthetic construct
  REGION 1..7: note = Synthetic peptide
QDNNRPS

SEQ ID NO: 33 - protein, 9 aa, synthetic construct
  REGION 1..9: note = Synthetic peptide
QAWDSRTVV

SEQ ID NO: 34 - protein, 5 aa, synthetic construct
  REGION 1..5: note = Synthetic peptide
TYFML

SEQ ID NO: 35 - protein, 17 aa, synthetic construct
  REGION 1..17: note = Synthetic peptide
SIYPSGGNTVYADSVKG

SEQ ID NO: 36 - protein, 15 aa, synthetic construct
  REGION 1..15: note = Synthetic peptide
AASPVRNYYYYGMDV

SEQ ID NO: 37 - protein, 11 aa, synthetic construct
  REGION 1..11: note = Synthetic peptide
RASQSISVYLN

SEQ ID NO: 38 - protein, 7 aa, synthetic construct
  REGION 1..7: note = Synthetic peptide
GASNLQF

SEQ ID NO: 39 - protein, 8 aa, synthetic construct
  REGION 1..8: note = Synthetic peptide
QQTFSLFT

SEQ ID NO: 40 - protein, 5 aa, synthetic construct
  REGION 1..5: note = Synthetic peptide
FYNMN

SEQ ID NO: 41 - protein, 17 aa, synthetic construct
  REGION 1..17: note = Synthetic peptide
SISPSGGETNYADSVKG

SEQ ID NO: 42 - protein, 15 aa, synthetic construct
  REGION 1..15: note = Synthetic peptide
GGGAYRNNWWGGFDI

SEQ ID NO: 43 - protein, 12 aa, synthetic construct
  REGION 1..12: note = Synthetic peptide
RASQSVSSSYLA

SEQ ID NO: 44 - protein, 7 aa, synthetic construct
  REGION 1..7: note = Synthetic peptide
GASSRAT

SEQ ID NO: 45 - protein, 9 aa, synthetic construct
  REGION 1..9: note = Synthetic peptide
QQYGSSPFT

SEQ ID NO: 46 - protein, 5 aa, synthetic construct
  REGION 1..5: note = Synthetic peptide
PYNMY

SEQ ID NO: 47 - protein, 17 aa, synthetic construct
  REGION 1..17: note = Synthetic peptide
SIRPSGGGTVYADSVKG

SEQ ID NO: 48 - protein, 12 aa, synthetic construct
  REGION 1..12: note = Synthetic peptide
GFIAARWYYFDY

SEQ ID NO: 49 - protein, 11 aa, synthetic construct
  REGION 1..11: note = Synthetic peptide
SGDQLGDKYVG

SEQ ID NO: 50 - protein, 7 aa, synthetic construct
  REGION 1..7: note = Synthetic peptide
QDTKRPS

SEQ ID NO: 51 - protein, 9 aa, synthetic construct
  REGION 1..9: note = Synthetic peptide
QAWDTSTAG

SEQ ID NO: 52 - protein, 5 aa, synthetic construct
  REGION 1..5: note = Synthetic peptide
WYTMV

SEQ ID NO: 53 - protein, 17 aa, synthetic construct
  REGION 1..17: note = Synthetic peptide
RIYPSGGWTKYADSVKG

SEQ ID NO: 54 - protein, 13 aa, synthetic construct
  REGION 1..13: note = Synthetic peptide
EGLLWFGENAFDI

SEQ ID NO: 55 - protein, 11 aa, synthetic construct
  REGION 1..11: note = Synthetic peptide
SGDKLGDKYAC

SEQ ID NO: 56 - protein, 7 aa, synthetic construct
  REGION 1..7: note = Synthetic peptide
QDSKRPS

SEQ ID NO: 57 - protein, 9 aa, synthetic construct
  REGION 1..9: note = Synthetic peptide
QAWDSSTGV

SEQ ID NO: 58 - protein, 5 aa, synthetic construct
  REGION 1..5: note = Synthetic peptide
WYLMI

SEQ ID NO: 59 - protein, 17 aa, synthetic construct
  REGION 1..17: note = Synthetic peptide
YIYPSGGFTYYADSVKG

SEQ ID NO: 60 - protein, 13 aa, synthetic construct
  REGION 1..13: note = Synthetic peptide
TEGPLSWGYGMDV

SEQ ID NO: 61 - protein, 11 aa, synthetic construct
  REGION 1..11: note = Synthetic peptide
SGDQLGDKYVG

SEQ ID NO: 62 - protein, 7 aa, synthetic construct
  REGION 1..7: note = Synthetic peptide
QDTKRPS

SEQ ID NO: 63 - protein, 9 aa, synthetic construct
  REGION 1..9: note = Synthetic peptide
QAWDTSTAG

SEQ ID NO: 64 - protein, 5 aa, synthetic construct
  REGION 1..5: note = Synthetic peptide
WYTMV

SEQ ID NO: 65 - protein, 17 aa, synthetic construct
  REGION 1..17: note = Synthetic peptide
RIYPSGGWTKYADSVKG

SEQ ID NO: 66 - protein, 13 aa, synthetic construct
  REGION 1..13: note = Synthetic peptide
EGLLWFGENAFDI

SEQ ID NO: 67 - protein, 11 aa, synthetic construct
  REGION 1..11: note = Synthetic peptide
SGNKLGDKYVA

SEQ ID NO: 68 - protein, 7 aa, synthetic construct
  REGION 1..7: note = Synthetic peptide
QDTKRPS

SEQ ID NO: 69 - protein, 9 aa, synthetic construct
  REGION 1..9: note = Synthetic peptide
QAWDSSIVI

SEQ ID NO: 70 - protein, 5 aa, synthetic construct
  REGION 1..5: note = Synthetic peptide
WYTMV

SEQ ID NO: 71 - protein, 17 aa, synthetic construct
  REGION 1..17: note = Synthetic peptide
YIYPSGGATFYADSVKG

SEQ ID NO: 72 - protein, 13 aa, synthetic construct
  REGION 1..13: note = Synthetic peptide
GSYDYIWGFYSDH

SEQ ID NO: 73 - protein, 11 aa, synthetic construct
  REGION 1..11: note = Synthetic peptide
SGDNLGNKYNS

SEQ ID NO: 74 - protein, 7 aa, synthetic construct
  REGION 1..7: note = Synthetic peptide
QDTKRPS

SEQ ID NO: 75 - protein, 8 aa, synthetic construct
  REGION 1..8: note = Synthetic peptide
QAWDGNVV

SEQ ID NO: 76 - protein, 5 aa, synthetic construct
  REGION 1..5: note = Synthetic peptide
WYEMG

SEQ ID NO: 77 - protein, 17 aa, synthetic construct
  REGION 1..17: note = Synthetic peptide
SIYSSGGGTMYADSVKG

SEQ ID NO: 78 - protein, 18 aa, synthetic construct
  REGION 1..18: note = Synthetic peptide
NPQYSGYDRSLSDGAFDI

SEQ ID NO: 79 - protein, 11 aa, synthetic construct
  REGION 1..11: note = Synthetic peptide
RASQSVSSYLA

SEQ ID NO: 80 - protein, 7 aa, synthetic construct
  REGION 1..7: note = Synthetic peptide
DASNRAT

SEQ ID NO: 81 - protein, 11 aa, synthetic construct
  REGION 1..11: note = Synthetic peptide
QQRSNWPRGFT

SEQ ID NO: 82 - protein, 5 aa, synthetic construct
  REGION 1..5: note = Synthetic peptide
YYHMS

SEQ ID NO: 83 - protein, 17 aa, synthetic construct
  REGION 1..17: note = Synthetic peptide
VISPSGGSTKYADSVKG

SEQ ID NO: 84 - protein, 19 aa, synthetic construct
  REGION 1..19: note = Synthetic peptide
GGSSDYAWGSYRRPYYFDY

SEQ ID NO: 85 - protein, 11 aa, synthetic construct
  REGION 1..11: note = Synthetic peptide
SGEKLGDKYVS

SEQ ID NO: 86 - protein, 7 aa, synthetic construct
  REGION 1..7: note = Synthetic peptide
EDSRRPS

SEQ ID NO: 87 - protein, 9 aa, synthetic construct
  REGION 1..9: note = Synthetic peptide
QAWDSSTAI

SEQ ID NO: 88 - protein, 5 aa, synthetic construct
  REGION 1..5: note = Synthetic peptide
YYMMV

SEQ ID NO: 89 - protein, 17 aa, synthetic construct
  REGION 1..17: note = Synthetic peptide
YIYSSGGHTVYADSVKG

SEQ ID NO: 90 - protein, 15 aa, synthetic construct
  REGION 1..15: note = Synthetic peptide
DLFLYDFWSKGAFDI

SEQ ID NO: 91 - protein, 11 aa, synthetic construct
  REGION 1..11: note = Synthetic peptide
SGDKLGDKYTS

SEQ ID NO: 92 - protein, 7 aa, synthetic construct
  REGION 1..7: note = Synthetic peptide
QDIKRPS

SEQ ID NO: 93 - protein, 10 aa, synthetic construct
  REGION 1..10: note = Synthetic peptide
QAWDSPNARV

SEQ ID NO: 94 - protein, 5 aa, synthetic construct
  REGION 1..5: note = Synthetic peptide
HYRMS

SEQ ID NO: 95 - protein, 17 aa, synthetic construct
  REGION 1..17: note = Synthetic peptide
SIYPSGGRTVYADSVKG

SEQ ID NO: 96 - protein, 19 aa, synthetic construct
  REGION 1..19: note = Synthetic peptide
DKFEWRLLFRGIGNDAFDI

SEQ ID NO: 97 - protein, 13 aa, synthetic construct
  REGION 1..13: note = Synthetic peptide
SGSSSNIGSNTVS

SEQ ID NO: 98 - protein, 7 aa, synthetic construct
  REGION 1..7: note = Synthetic peptide
NDHRRPS

SEQ ID NO: 99 - protein, 11 aa, synthetic construct
  REGION 1..11: note = Synthetic peptide
SAWDDSLNGVV

SEQ ID NO: 100 - protein, 5 aa, synthetic construct
  REGION 1..5: note = Synthetic peptide
RYEMY

SEQ ID NO: 101 - protein, 17 aa, synthetic construct
  REGION 1..17: note = Synthetic peptide
SISSSGGPTAYADSVKG

SEQ ID NO: 102 - protein, 20 aa, synthetic construct
  REGION 1..20: note = Synthetic peptide
GTPKWELLLRSIYIENAFDI

SEQ ID NO: 103 - protein, 15 aa, synthetic construct
  REGION 1..15: note = Synthetic peptide
RSSQSLSDDGNTYLD

SEQ ID NO: 104 - protein, 7 aa, synthetic construct
  REGION 1..7: note = Synthetic peptide
TLSYRAS

SEQ ID NO: 105 - protein, 9 aa, synthetic construct
  REGION 1..9: note = Synthetic peptide
MQGTHWPPT

SEQ ID NO: 106 - protein, 5 aa, synthetic construct
  REGION 1..5: note = Synthetic peptide
FYAMH

SEQ ID NO: 107 - protein, 17 aa, synthetic construct
  REGION 1..17: note = Synthetic peptide
GIVPSGGRTHYADSVKG

SEQ ID NO: 108 - protein, 12 aa, synthetic construct
  REGION 1..12: note = Synthetic peptide
DSSGSPNPLFDY

SEQ ID NO: 109 - protein, 16 aa, synthetic construct
  REGION 1..16: note = Synthetic peptide
RSSLSLLHSNGYNYLD

SEQ ID NO: 110 - protein, 7 aa, synthetic construct
  REGION 1..7: note = Synthetic peptide
LSSTRAS

SEQ ID NO: 111 - protein, 9 aa, synthetic construct
  REGION 1..9: note = Synthetic peptide
MQPLETPPT

SEQ ID NO: 112 - protein, 5 aa, synthetic construct
  REGION 1..5: note = Synthetic peptide
YYEMD

SEQ ID NO: 113 - protein, 17 aa, synthetic construct
  REGION 1..17: note = Synthetic peptide
GISSSGGHTAYADSVKG

SEQ ID NO: 114 - protein, 16 aa, synthetic construct
  REGION 1..16: note = Synthetic peptide
ERRSSSRARYYYGMDV

SEQ ID NO: 115 - protein, 13 aa, synthetic construct
  REGION 1..13: note = Synthetic peptide
SGNNSNFGSNTVT

SEQ ID NO: 116 - protein, 7 aa, synthetic construct
  REGION 1..7: note = Synthetic peptide
SDSRRPS

SEQ ID NO: 117 - protein, 10 aa, synthetic construct
  REGION 1..10: note = Synthetic peptide
AAWDDSLNGV

SEQ ID NO: 118 - protein, 5 aa, synthetic construct
  REGION 1..5: note = Synthetic peptide
DYRMQ

SEQ ID NO: 119 - protein, 17 aa, synthetic construct
  REGION 1..17: note = Synthetic peptide
VIVPSGGNTMYADSVKG

SEQ ID NO: 120 - protein, 21 aa, synthetic construct
  REGION 1..21: note = Synthetic peptide
GGPGSSIAARRAPTGYYGMDV

SEQ ID NO: 121 - protein, 11 aa, synthetic construct
  REGION 1..11: note = Synthetic peptide
RASQPIDNYLN

SEQ ID NO: 122 - protein, 7 aa, synthetic construct
  REGION 1..7: note = Synthetic peptide
AASRLQS

SEQ ID NO: 123 - protein, 9 aa, synthetic construct
  REGION 1..9: note = Synthetic peptide
QQSYTVPYT

SEQ ID NO: 124 - protein, 5 aa, synthetic construct
  REGION 1..5: note = Synthetic peptide
AYSMI

SEQ ID NO: 125 - protein, 17 aa, synthetic construct
  REGION 1..17: note = Synthetic peptide
YIRPSGGRTTYADSVKG

SEQ ID NO: 126 - protein, 17 aa, synthetic construct
  REGION 1..17: note = Synthetic peptide
GGLLLWFRELKSNYFDY

SEQ ID NO: 127 - protein, 11 aa, synthetic construct
  REGION 1..11: note = Synthetic peptide
RASQSVSSYLA

SEQ ID NO: 128 - protein, 7 aa, synthetic construct
  REGION 1..7: note = Synthetic peptide
DASNRAT

SEQ ID NO: 129 - protein, 11 aa, synthetic construct
  REGION 1..11: note = Synthetic peptide
QQRSNWPRGFT

SEQ ID NO: 130 - protein, 5 aa, synthetic construct
  REGION 1..5: note = Synthetic peptide
YYHMS

SEQ ID NO: 131 - protein, 17 aa, synthetic construct
  REGION 1..17: note = Synthetic peptide
VISPSGGSTKYADSVKG

SEQ ID NO: 132 - protein, 19 aa, synthetic construct
  REGION 1..19: note = Synthetic peptide
GGSSDYAWGSYRRPYYFDY

SEQ ID NO: 133 - protein, 11 aa, synthetic construct
  REGION 1..11: note = Synthetic peptide
SGDKLGDKYTS

SEQ ID NO: 134 - protein, 7 aa, synthetic construct
  REGION 1..7: note = Synthetic peptide
QDIKRPS

SEQ ID NO: 135 - protein, 10 aa, synthetic construct
  REGION 1..10: note = Synthetic peptide
QAWDSPNARV

SEQ ID NO: 136 - protein, 5 aa, synthetic construct
  REGION 1..5: note = Synthetic peptide
HYRMS

SEQ ID NO: 137 - protein, 17 aa, synthetic construct
  REGION 1..17: note = Synthetic peptide
SIYPSGGRTVYADSVKG

SEQ ID NO: 138 - protein, 19 aa, synthetic construct
  REGION 1..19: note = Synthetic peptide
DKFEWRLLFRGIGNDAFDI

SEQ ID NO: 139 - protein, 11 aa, synthetic construct
  REGION 1..11: note = Synthetic peptide
RASGDIGNALG

SEQ ID NO: 140 - protein, 7 aa, synthetic construct
  REGION 1..7: note = Synthetic peptide
DASTLQS

SEQ ID NO: 141 - protein, 9 aa, synthetic construct
  REGION 1..9: note = Synthetic peptide
LQGYNYPRT

SEQ ID NO: 142 - protein, 5 aa, synthetic construct
  REGION 1..5: note = Synthetic peptide
RYIMH

SEQ ID NO: 143 - protein, 17 aa, synthetic construct
  REGION 1..17: note = Synthetic peptide
SISPSGGLTSYADSVKG

SEQ ID NO: 144 - protein, 15 aa, synthetic construct
  REGION 1..15: note = Synthetic peptide
EFENAYHYYYYGMDV

SEQ ID NO: 145 - protein, 11 aa, synthetic construct
  REGION 1..11: note = Synthetic peptide
RASQSISSYLS

SEQ ID NO: 146 - protein, 7 aa, synthetic construct
  REGION 1..7: note = Synthetic peptide
AASSLQS

SEQ ID NO: 147 - protein, 9 aa, synthetic construct
  REGION 1..9: note = Synthetic peptide
QQSISIPRT

SEQ ID NO: 148 - protein, 5 aa, synthetic construct
  REGION 1..5: note = Synthetic peptide
PYFMG

SEQ ID NO: 149 - protein, 17 aa, synthetic construct
  REGION 1..17: note = Synthetic peptide
GIGPSGGSTTYADSVKG

SEQ ID NO: 150 - protein, 20 aa, synthetic construct
  REGION 1..20: note = Synthetic peptide
EGPPYSSGWYRGLRQYHFDY

SEQ ID NO: 151 - protein, 11 aa, synthetic construct
  REGION 1..11: note = Synthetic peptide
RASQGISSYLA

SEQ ID NO: 152 - protein, 7 aa, synthetic construct
  REGION 1..7: note = Synthetic peptide
AASTLQS

SEQ ID NO: 153 - protein, 9 aa, synthetic construct
  REGION 1..9: note = Synthetic peptide
QQLNSYPLT

SEQ ID NO: 154 - protein, 5 aa, synthetic construct
  REGION 1..5: note = Synthetic peptide
HYLMT

SEQ ID NO: 155 - protein, 17 aa, synthetic construct
  REGION 1..17: note = Synthetic peptide
YISPSGGHTIYADSVKG

SEQ ID NO: 156 - protein, 16 aa, synthetic construct
  REGION 1..16: note = Synthetic peptide
VARGIAARSRTSYFDY

SEQ ID NO: 157 - protein, 11 aa, synthetic construct
  REGION 1..11: note = Synthetic peptide
SGDKLGDKYVS

SEQ ID NO: 158 - protein, 7 aa, synthetic construct
  REGION 1..7: note = Synthetic peptide
QDTKRPS

SEQ ID NO: 159 - protein, 9 aa, synthetic construct
  REGION 1..9: note = Synthetic peptide
QAWDSSTYV

SEQ ID NO: 160 - protein, 5 aa, synthetic construct
  REGION 1..5: note = Synthetic peptide
DYAMK

SEQ ID NO: 161 - protein, 17 aa, synthetic construct
  REGION 1..17: note = Synthetic peptide
SISSSGGVTQYADSVKG

SEQ ID NO: 162 - protein, 21 aa, synthetic construct
  REGION 1..21: note = Synthetic peptide
EEDYSSSWYSRRFDYYYGMDV

SEQ ID NO: 163 - protein, 11 aa, synthetic construct
  REGION 1..11: note = Synthetic peptide
RASQSISSWLA

SEQ ID NO: 164 - protein, 7 aa, synthetic construct
  REGION 1..7: note = Synthetic peptide
KASTLES

SEQ ID NO: 165 - protein, 8 aa, synthetic construct
  REGION 1..8: note = Synthetic peptide
QQYNTYWT

SEQ ID NO: 166 - protein, 5 aa, synthetic construct
  REGION 1..5: note = Synthetic peptide
HYIMM

SEQ ID NO: 167 - protein, 17 aa, synthetic construct
  REGION 1..17: note = Synthetic peptide
GIYSSGGITVYADSVKG

SEQ ID NO: 168 - protein, 13 aa, synthetic construct
  REGION 1..13: note = Synthetic peptide
RRTGIPRRDAFDI

SEQ ID NO: 169 - protein, 11 aa, synthetic construct
  REGION 1..11: note = Synthetic peptide
RASQPIDNYLN

SEQ ID NO: 170 - protein, 7 aa, synthetic construct
  REGION 1..7: note = Synthetic peptide
AASRLQS

SEQ ID NO: 171 - protein, 9 aa, synthetic construct
  REGION 1..9: note = Synthetic peptide
QQSYTVPYT

SEQ ID NO: 172 - protein, 5 aa, synthetic construct
  REGION 1..5: note = Synthetic peptide
AYSMI

SEQ ID NO: 173 - protein, 17 aa, synthetic construct
  REGION 1..17: note = Synthetic peptide
YIRPSGGRTTYADSVKG

SEQ ID NO: 174 - protein, 17 aa, synthetic construct
  REGION 1..17: note = Synthetic peptide
GGLLLWSRELKSNYFDY

SEQ ID NO: 175 - protein, 11 aa, synthetic construct
  REGION 1..11: note = Synthetic peptide
RASQPIDNYLN

SEQ ID NO: 176 - protein, 7 aa, synthetic construct
  REGION 1..7: note = Synthetic peptide
AASRLQS

SEQ ID NO: 177 - protein, 9 aa, synthetic construct
  REGION 1..9: note = Synthetic peptide
QQSYTVPYT

SEQ ID NO: 178 - protein, 5 aa, synthetic construct
  REGION 1..5: note = Synthetic peptide
AYSMI

SEQ ID NO: 179 - protein, 17 aa, synthetic construct
  REGION 1..17: note = Synthetic peptide
YIRPSGGRTTYADSVKG

SEQ ID NO: 180 - protein, 17 aa, synthetic construct
  REGION 1..17: note = Synthetic peptide
GGLLLWFMELKSNYFDY

SEQ ID NO: 181 - protein, 11 aa, synthetic construct
  REGION 1..11: note = Synthetic peptide
RASQPIDNYLN

SEQ ID NO: 182 - protein, 7 aa, synthetic construct
  REGION 1..7: note = Synthetic peptide
AASRLQS

SEQ ID NO: 183 - protein, 9 aa, synthetic construct
  REGION 1..9: note = Synthetic peptide
QQSYTVPYT

SEQ ID NO: 184 - protein, 5 aa, synthetic construct
  REGION 1..5: note = Synthetic peptide
AYSMI

SEQ ID NO: 185 - protein, 17 aa, synthetic construct
  REGION 1..17: note = Synthetic peptide
YIRPSGGRTTYADSVKG

SEQ ID NO: 186 - protein, 17 aa, synthetic construct
  REGION 1..17: note = Synthetic peptide
GGLLLWGRELKSNYFDY

SEQ ID NO: 187 - protein, 11 aa, synthetic construct
  REGION 1..11: note = Synthetic peptide
RASQPIDNYLN

SEQ ID NO: 188 - protein, 7 aa, synthetic construct
  REGION 1..7: note = Synthetic peptide
AASRLQS

SEQ ID NO: 189 - protein, 9 aa, synthetic construct
  REGION 1..9: note = Synthetic peptide
QQSYTVPYT

SEQ ID NO: 190 - protein, 5 aa, synthetic construct
  REGION 1..5: note = Synthetic peptide
AYSMI

SEQ ID NO: 191 - protein, 17 aa, synthetic construct
  REGION 1..17: note = Synthetic peptide
YIRPSGGRTTYADSVKG

SEQ ID NO: 192 - protein, 17 aa, synthetic construct
  REGION 1..17: note = Synthetic peptide
GGLLLWNRELKSNYFDY

SEQ ID NO: 193 - protein, 11 aa, synthetic construct
  REGION 1..11: note = Synthetic peptide
RASQPIDNYLN

SEQ ID NO: 194 - protein, 7 aa, synthetic construct
  REGION 1..7: note = Synthetic peptide
AASRLQS

SEQ ID NO: 195 - protein, 9 aa, synthetic construct
  REGION 1..9: note = Synthetic peptide
QQSYTVPYT

SEQ ID NO: 196 - protein, 5 aa, synthetic construct
  REGION 1..5: note = Synthetic peptide
AYSMI

SEQ ID NO: 197 - protein, 17 aa, synthetic construct
  REGION 1..17: note = Synthetic peptide
YIRPSGGRTTYADSVKG

SEQ ID NO: 198 - protein, 17 aa, synthetic construct
  REGION 1..17: note = Synthetic peptide
GGLLLWDRELKSNYFDY

SEQ ID NO: 199 - protein, 11 aa, synthetic construct
  REGION 1..11: note = Synthetic peptide
RASQPIDNYLN

SEQ ID NO: 200 - protein, 7 aa, synthetic construct
  REGION 1..7: note = Synthetic peptide
AASRLQS

SEQ ID NO: 201 - protein, 9 aa, synthetic construct
  REGION 1..9: note = Synthetic peptide
QQSYTVPYT

SEQ ID NO: 202 - protein, 5 aa, synthetic construct
  REGION 1..5: note = Synthetic peptide
AYSMI

SEQ ID NO: 203 - protein, 17 aa, synthetic construct
  REGION 1..17: note = Synthetic peptide
YIRPSGGRTTYADSVKG

SEQ ID NO: 204 - protein, 17 aa, synthetic construct
  REGION 1..17: note = Synthetic peptide
GGLLLWQRELKSNYFDY

SEQ ID NO: 205 - protein, 11 aa, synthetic construct
  REGION 1..11: note = Synthetic peptide
RASQPIDNYLN

SEQ ID NO: 206 - protein, 7 aa, synthetic construct
  REGION 1..7: note = Synthetic peptide
AASRLQS

SEQ ID NO: 207 - protein, 9 aa, synthetic construct
  REGION 1..9: note = Synthetic peptide
QQSYTVPYT

SEQ ID NO: 208 - protein, 5 aa, synthetic construct
  REGION 1..5: note = Synthetic peptide
AYSMI

SEQ ID NO: 209 - protein, 17 aa, synthetic construct
  REGION 1..17: note = Synthetic peptide
YIRPSGGRTTYADSVKG

SEQ ID NO: 210 - protein, 17 aa, synthetic construct
  REGION 1..17: note = Synthetic peptide
GGLLLWTRELKSNYFDY

SEQ ID NO: 211 - protein, 11 aa, synthetic construct
  REGION 1..11: note = Synthetic peptide
RASQPIDNYLN

SEQ ID NO: 212 - protein, 7 aa, synthetic construct
  REGION 1..7: note = Synthetic peptide
AASRLQS

SEQ ID NO: 213 - protein, 9 aa, synthetic construct
  REGION 1..9: note = Synthetic peptide
QQSYTVPYT

SEQ ID NO: 214 - protein, 5 aa, synthetic construct
  REGION 1..5: note = Synthetic peptide
AYSMI

SEQ ID NO: 215 - protein, 17 aa, synthetic construct
  REGION 1..17: note = Synthetic peptide
YIRPSGGRTTYADSVKG

SEQ ID NO: 216 - protein, 17 aa, synthetic construct
  REGION 1..17: note = Synthetic peptide
GGLLLWARELKSNYFDY

SEQ ID NO: 217 - protein, 11 aa, synthetic construct
  REGION 1..11: note = Synthetic peptide
RASQPIDNYLN

SEQ ID NO: 218 - protein, 7 aa, synthetic construct
  REGION 1..7: note = Synthetic peptide
AASRLQS

SEQ ID NO: 219 - protein, 9 aa, synthetic construct
  REGION 1..9: note = Synthetic peptide
QQSYTVPYT

SEQ ID NO: 220 - protein, 5 aa, synthetic construct
  REGION 1..5: note = Synthetic peptide
AYSMI

SEQ ID NO: 221 - protein, 17 aa, synthetic construct
  REGION 1..17: note = Synthetic peptide
YIRPSGGRTTYADSVKG

SEQ ID NO: 222 - protein, 17 aa, synthetic construct
  REGION 1..17: note = Synthetic peptide
GGLLLWERELKSNYFDY

SEQ ID NO: 223 - protein, 12 aa, synthetic construct
  REGION 1..12: note = Synthetic peptide
RTSQFVNSNYLA

SEQ ID NO: 224 - protein, 7 aa, synthetic construct
  REGION 1..7: note = Synthetic peptide
GASSRAT

SEQ ID NO: 225 - protein, 9 aa, synthetic construct
  REGION 1..9: note = Synthetic peptide
QQSSRTPWT

SEQ ID NO: 226 - protein, 5 aa, synthetic construct
  REGION 1..5: note = Synthetic peptide
HYLMT

SEQ ID NO: 227 - protein, 17 aa, synthetic construct
  REGION 1..17: note = Synthetic peptide
YISPSGGHTIYADSVKG

SEQ ID NO: 228 - protein, 16 aa, synthetic construct
  REGION 1..16: note = Synthetic peptide
VARGIAARSRTSYFDY

SEQ ID NO: 229 - protein, 108 aa, synthetic construct
  REGION 1..108: note = Synthetic polypeptide
QDIQMTQSPSSLSASVGDRVTITCRASQSIRNYLNWYQQKPGKAPNLLIYAASTLQSGVPARFSGSGSGTDFTLTISSLQPEDFATYYCQQLSGYPHTFGQGTKLEIK

SEQ ID NO: 230 - protein, 142 aa, synthetic construct
  REGION 1..142: note = Synthetic polypeptide
EVQLLESGGGLVQPGGSLRLSCAASGFTFSFYYMVWVRQAPGKGLEWVSVIYPSGGITVYADSVKGRFTISRDNSKNTLYLQMNSLRAEDTAVYYCARDKWAVMPPYYYYAMDVWGQGTTVTVSSASTKGPSVFPLAPSSKS

SEQ ID NO: 231 - protein, 111 aa, synthetic construct
  REGION 1..111: note = Synthetic polypeptide
QSALTQPASVSGSPGQSITISCTGTNSDVGNYNLVSWYQQHPGEAPKLLIYEVNKRPSGVSNRFSGSKSGNTASLTISGLQAEDEADYLCCSYAGNRNFYVFGAGTKVTVL

SEQ ID NO: 232 - protein, 140 aa, synthetic construct
  REGION 1..140: note = Synthetic polypeptide
EVQLLESGGGLVQPGGSLRLSCAASGFTFSWYSMVWVRQAPGKGLEWVSSISPSGGLTNYADSVKGRFTISRDNSKNTLYLQMNSLRAEDTAVYYCARHTAARPFYYYYMDVWGKGTTVTVSSASTKGPSVFPLAPSSKS

SEQ ID NO: 233 - protein, 106 aa, synthetic construct
  REGION 1..106: note = Synthetic polypeptide
QSELTQPPSVSVSPGQTASITCSGDKLGDKYACWYQQKPGQSPVLVIYQDSKRPSGIPERFSGSNSGNTATLTISGTQAMDEADYYCQAWDSSTGVFGGGTKLTVL

SEQ ID NO: 234 - protein, 139 aa, synthetic construct
  REGION 1..139: note = Synthetic polypeptide
EVQLLESGGGLVQPGGSLRLSCAASGFTFSWYLMIWVRQAPGKGLEWVSYIYPSGGFTYYADSVKGRFTISRDNSKNTLYLQMNSLRAEDMAVYYCARTEGPLSWGYGMDVWGQGTTVTVSSASTKGPSVFPLAPSSKS

SEQ ID NO: 235 - protein, 106 aa, synthetic construct
  REGION 1..106: note = Synthetic polypeptide
QCELTQPPSESVSPGQTANITCSGDKLGNKYAYWYQQKPGQSPVLVIYQDNNRPSGIPERFSGSNSGNTATLTISGTQAIDEANYYCQAWDSRTVVFGGGTKLTVL

SEQ ID NO: 236 - protein, 141 aa, synthetic construct
  REGION 1..141: note = Synthetic polypeptide
EVQLLESGGGLVQPGGSLRLSCAASGFTFSTYFMLWVRQAPGKGLEWVSSIYPSGGNTVYADSVKGRFTISRDNSKNTLYLQMNSLRAEDTAVYYCARAASPVRNYYYYGMDVWGQGTTVTVSSASTKGPSVFPLAPSSKS

SEQ ID NO: 237 - protein, 107 aa, synthetic construct
  REGION 1..107: note = Synthetic polypeptide
QDIQMTQSPSSLSASVGDRVTITCRASQSISVYLNWYQHKPGKAPKLLIYGASNLQFGVPSRFSGSGYGTDFTLTISSLQPEDFATYHCQQTFSLFTFGGGTKVEIK

SEQ ID NO: 238 - protein, 141 aa, synthetic construct
  REGION 1..141: note = Synthetic polypeptide
EVQLLESGGGLVQPGGSLRLSCAASGFTFSFYNMNWVRQAPGKGLEWVSSISPSGGETNYADSVKGRFTISRDNSKNTLYLQMNSLRAEDTAVYYCARGGGAYRNNWWGGFDIWGLGTMVTVSSASTKGPSVFPLAPSSKS

SEQ ID NO: 239 - protein, 109 aa, synthetic construct
  REGION 1..109: note = Synthetic polypeptide
QDIQMTQSPGTLSLSPGERATLSCRASQSVSSSYLAWYQQKPGQAPRLLIYGASSRATGIPDRFSGSGSGTDFTLTISRLEPEDFAVYYCQQYGSSPFTFGPGTKVDIK

SEQ ID NO: 240 - protein, 138 aa, synthetic construct
  REGION 1..138: note = Synthetic polypeptide
EVQLLESGGGLVQPGGSLRLSCAASGFTFSPYNMYWVRQAPGKGLEWVSSIRPSGGGTVYADSVKGRFTISRDNSKNTLYLQMNSLRAEDTAVYYCAGGFIAARWYYFDYWGQGTLVTVSSASTKGPSVFPLAPSSKS

SEQ ID NO: 241 - protein, 106 aa, synthetic construct
  REGION 1..106: note = Synthetic polypeptide
QSVLTQPPSVSVSPGQTATITCSGDQLGDKYVGWYQQKPGQSPILVIYQDTKRPSGIPERFSGSNSGNTATLTISGTHTVDEAHYYCQAWDTSTAGFGGGTKLTVL

SEQ ID NO: 242 - protein, 139 aa, synthetic construct
  REGION 1..139: note = Synthetic polypeptide
EVQLLESGGGLVQPGGSLRLSCAASGFTFSWYTMVWVRQAPGKGLEWVSRIYPSGGWTKYADSVKGRFTISRDNSKNTLYLQMNSLRAEDTATYYCAREGLLWFGENAFDIWGQGTMVTVSSASTKGPSVFPLAPSSKS

SEQ ID NO: 243 - protein, 106 aa, synthetic construct; identical to SEQ ID NO: 233
  REGION 1..106: note = Synthetic polypeptide

SEQ ID NO: 244 - protein, 139 aa, synthetic construct; identical to SEQ ID NO: 234
  REGION 1..139: note = Synthetic polypeptide

SEQ ID NO: 245 - protein, 106 aa, synthetic construct; identical to SEQ ID NO: 241
  REGION 1..106: note = Synthetic polypeptide

SEQ ID NO: 246 - protein, 139 aa, synthetic construct; identical to SEQ ID NO: 242
  REGION 1..139: note = Synthetic polypeptide

SEQ ID NO: 247 - protein, 106 aa, synthetic construct
  REGION 1..106: note = Synthetic polypeptide
QSALTQPPTVSVSPGQTARITCSGNKLGDKYVAWYQQKPGQSPMLVIYQDTKRPSRVSERFSGSNSANTATLSISGTQALDEADYYCQAWDSSIVIFGGGTRLTVL

SEQ ID NO: 248 - protein, 139 aa, synthetic construct
  REGION 1..139: note = Synthetic polypeptide
EVQLLESGGGLVQPGGSLRLSCAASGFTFSWYTMVWVRQAPGKGLEWVSYIYPSGGATFYADSVKGRFTISRDNSKNTLYLQMNSLRAEDTAVYYCAMGSYDYIWGFYSDHWGQGTLVTVSSASTKGPSVFPLAPSSKS

SEQ ID NO: 249 - protein, 105 aa, synthetic construct
  REGION 1..105: note = Synthetic polypeptide
QYELTQPPSVSVSPGQTATITCSGDNLGNKYNSWYQQKPGQSPLLVIYQDTKRPSAIPERFSGSNSGNTATLTISGTQAMDEADYYCQAWDGNVVFGGGTKLTVL

SEQ ID NO: 250 - protein, 144 aa, synthetic construct
  REGION 1..144: note = Synthetic polypeptide
EVQLLESGGGLVQPGGSLRLSCAASGFTFSWYEMGWVRQAPGKGLEWVSSIYSSGGGTMYADSVKGRFTISRDNSKNTLYLQMNSLRAEDTAVYYCARNPQYSGYDRSLSDGAFDIWGQGTMVTVSSASTKGPSVFPLAPSSKS

SEQ ID NO: 251 - protein, 110 aa, synthetic construct
  REGION 1..110: note = Synthetic polypeptide
QDIQMTQSPATLSLSPGERATLSCRASQSVSSYLAWYQQKPGQAPRLLIYDASNRATGIPARFSGSGSGTDFTLTISSLEPEDFAVYYCQQRSNWPRGFTFGPGTKVDIK

SEQ ID NO: 252 - protein, 145 aa, synthetic construct
  REGION 1..145: note = Synthetic polypeptide
EVQLLESGGGLVQPGGSLRLSCAASGFTFSYYHMSWVRQAPGKGLEWVSVISPSGGSTKYADSVKGRFTISRDNSKNTLYLQMNSLRAEDTAVYYCARGGSSDYAWGSYRRPYYFDYWGQGTLVTVSSASTKGPSVFPLAPSSKS

SEQ ID NO: 253 - protein, 106 aa, synthetic construct
  REGION 1..106: note = Synthetic polypeptide
QSVLTQPPSVSVSPGQTASITCSGEKLGDKYVSWYQQKPGQSPSLVICEDSRRPSGIPERFSGSNSGNTATLTISGAQPMDEADYYCQAWDSSTAIFGPGTKVTVL

SEQ ID NO: 254 - protein, 141 aa, synthetic construct
  REGION 1..141: note = Synthetic polypeptide
EVQLLESGGGLVQPGGSLRLSCAASGFTFSYYMMVWVRQAPGKGLEWVSYIYSSGGHTVYADSVKGRFTISRDNSKNTLYLQMNSLRAEDTAVYYCARDLFLYDFWSKGAFDIWGQGTMVTVSSASTKGPSVFPLAPSSKS

SEQ ID NO: 255 - protein, 107 aa, synthetic construct
  REGION 1..107: note = Synthetic polypeptide
QSVLTQPPSVSVSPGQTASITCSGDKLGDKYTSWYQQRPGQSPVLVIYQDIKRPSGIPERFSGSNSGNTATLTISGTQAMDEADYYCQAWDSPNARVFGSGTKVTVL

SEQ ID NO: 256 - protein, 145 aa, synthetic construct
  REGION 1..145: note = Synthetic polypeptide
EVQLLESGGGLVQPGGSLRLSCAASGFTFSHYRMSWVRQAPGKGLEWVSSIYPSGGRTVYADSVKGRFTISRDNSKNTLYLQMNSLRAEDTAVYYCAKDKFEWRLLFRGIGNDAFDIWGQGTMVTVSSASTKGPSVFPLAPSSKS

SEQ ID NO: 257 - protein, 110 aa, synthetic construct
  REGION 1..110: note = Synthetic polypeptide
QSELTQPPSASETPGQRVTISCSGSSSNIGSNTVSWFQQLPGSAPRLLIYNDHRRPSGVPDRFSGSKSGTSASLVISGLQSQDEADYYCSAWDDSLNGVVFGGGTKLTVL

SEQ ID NO: 258 - protein, 146 aa, synthetic construct
  REGION 1..146: note = Synthetic polypeptide
EVQLLESGGGLVQPGGSLRLSCAASGFTFSRYEMYWVRQAPGKGLEWVSSISSSGGPTAYADSVKGRFTISRDNSKNTLYLQMNSLRAEDTAMYYCAKGTPKWELLLRSIYIENAFDIWGQGTMVTVSSASTKGPSVFPLAPSSKS

SEQ ID NO: 259 - protein, 112 aa, synthetic construct
  REGION 1..112: note = Synthetic polypeptide
QDIVMTQTPPSLPVNPGEPASISCRSSQSLSDDGNTYLDWYLQRPGQSPQLLIHTLSYRASGVPDRFSGSGSGTDFTLKISRVEAEDVGVYYCMQGTHWPPTFGQGTKVEIK

SEQ ID NO: 260 - protein, 138 aa, synthetic construct
  REGION 1..138: note = Synthetic polypeptide
EVQLLESGGGLVQPGGSLRLSCAASGFTFSFYAMHWVRQAPGKGLEWVSGIVPSGGRTHYADSVKGRFTISRDNSKNTLYLQMNSLRAEDTAVYYCATDSSGSPNPLFDYWGQGTLVTVSSASTKGPSVFPLAPSPKS

SEQ ID NO: 261 - protein, 113 aa, synthetic construct
  REGION 1..113: note = Synthetic polypeptide
QDIQMTQSPLSLSVTPGEPASISCRSSLSLLHSNGYNYLDWYVQRPGQSPQLLMYLSSTRASGVPDRFSGSGSGTDFTLEISRVEAEDVGVYYCMQPLETPPTFGGGTKVEIK

SEQ ID NO: 262 - protein, 142 aa, synthetic construct
  REGION 1..142: note = Synthetic polypeptide
EVQLLESGGGLVQPGGSLRLSCAASGFTFSYYEMDWVRQAPGKGLEWVSGISSSGGHTAYADSVKGRFTISRDNSKNTLYLQMNSLRAEDTATYYCARERRSSSRARYYYGMDVWGQGTTVTVSSASTKGPSVFPLAPSSKS

SEQ ID NO: 263 - protein, 109 aa, synthetic construct
  REGION 1..109: note = Synthetic polypeptide
QSVLIQPPSVSGIPGQRVTISCSGNNSNFGSNTVTWYQQLPGTAPKLLIYSDSRRPSGVPDRFSGSRSDTSASLAISGLQSEDEAEYHCAAWDDSLNGVFGGGTKLTVL

SEQ ID NO: 264 - protein, 147 aa, synthetic construct
  REGION 1..147: note = Synthetic polypeptide
EVQLLESGGGLVQPGGSLRLSCAASGFTFSDYRMQWVRQAPGKGLEWVSVIVPSGGNTMYADSVKGRFTISRDNSKNTLYLQMNSLRAEDTAVYYCARGGPGSSIAARRAPTGYYGMDVWGQGTTVTVSSASTKGPSVFPLAPSSKS

SEQ ID NO: 265 - protein, 108 aa, synthetic construct
  REGION 1..108: note = Synthetic polypeptide
QDIQMTQSPSSLSAFVGDRVTITCRASQPIDNYLNWYHQKPGKAPKLLIYAASRLQSGVPSRLSGSGFGTDFTLTISSLQPEDFGNYYCQQSYTVPYTFGGGTKVEIR

SEQ ID NO: 266 - protein, 143 aa, synthetic construct
  REGION 1..143: note = Synthetic polypeptide
EVQLLESGGGLVQPGGSLRLSCAASGFTFSAYSMIWVRQAPGKGLEWVSYIRPSGGRTTYADSVKGRFTISRDNSKNTLYLQMNSLRAEDTAVYYCARGGLLLWFRELKSNYFDYWGQGTLVTVSSASTKGPSVFPLAPSSKS

SEQ ID NO: 267 - protein, 110 aa, synthetic construct; identical to SEQ ID NO: 251
  REGION 1..110: note = Synthetic polypeptide

SEQ ID NO: 268 - protein, 145 aa, synthetic construct; identical to SEQ ID NO: 252
  REGION 1..145: note = Synthetic polypeptide

SEQ ID NO: 269 - protein, 107 aa, synthetic construct; identical to SEQ ID NO: 255
  REGION 1..107: note = Synthetic polypeptide

SEQ ID NO: 270 - protein, 145 aa, synthetic construct; identical to SEQ ID NO: 256
  REGION 1..145: note = Synthetic polypeptide

SEQ ID NO: 271 - protein, 108 aa, synthetic construct
  REGION 1..108: note = Synthetic polypeptide
QDIQMTQSPSSLSASVGDRVTITCRASGDIGNALGWYQQKPGKAPRLLISDASTLQSGVPLRFSGSGSGTEFTLTISSLQPEDFATYYCLQGYNYPRTFGQGTKLEIR

SEQ ID NO: 272 - protein, 141 aa, synthetic construct
  REGION 1..141: note = Synthetic polypeptide
EVQLLESGGGLVQPGGSLRLSCAASGFTFSRYIMHWVRQAPGKGLEWVSSISPSGGLTSYADSVKGRFTISRDNSKNTLYLQMNSLRAEDTAVYYCAREFENAYHYYYYGMDVWGQGTTVTVSSASTKGPSVFPLAPSSKS

SEQ ID NO: 273 - protein, 108 aa, synthetic construct
  REGION 1..108: note = Synthetic polypeptide
QDIQMTQSPSSLSASVGDRVTITCRASQSISSYLSWYQQRPGKAPNLLIYAASSLQSGVPSRFSGSGSGTDFTLTISSLQPEDFATYYCQQSISIPRTFGQGTKVEVK

SEQ ID NO: 274 - protein, 146 aa, synthetic construct
  REGION 1..146: note = Synthetic polypeptide
EVQLLESGGGLVQPGGSLRLSCAASGFTFSPYFMGWVRQAPGKGLEWVSGIGPSGGSTTYADSVKGRFTISRDNSKNTLYLQMNSLRAEDTAVYYCAREGPPYSSGWYRGLRQYHFDYWGQGTLVTVSSASTKGPSVFPLAPSSKS

SEQ ID NO: 275 - protein, 108 aa, synthetic construct
  REGION 1..108: note = Synthetic polypeptide
QDIQMTQSPSFLSASVGDRVTITCRASQGISSYLAWYQQKPGKAPKLLIYAASTLQSGVPSRFSGSGSGTEFTLTISSLQPEDFATYYCQQLNSYPLTFGGGTKVEIK

SEQ ID NO: 276 - protein, 142 aa, synthetic construct
  REGION 1..142: note = Synthetic polypeptide
EVQLLESGGGLVQPGGSLRLSCAASGFTFSHYLMTWVRQAPGKGLEWVSYISPSGGHTIYADSVKGRFTISRDNSKNTLYLQMNSLRAEDTAVYYCARVARGIAARSRTSYFDYWGQGTLVTVSSASTKGPSVFPLAPSSKS

SEQ ID NO: 277 - protein, 106 aa, synthetic construct
  REGION 1..106: note = Synthetic polypeptide
QSALTQPPSVSVSPGQTASITCSGDKLGDKYVSWYQQRPGQSPVLVIYQDTKRPSGIPERFSGSNSGNTATLTISGTQAVDEADYYCQAWDSSTYVFGGGTKVTVL

SEQ ID NO: 278 - protein, 147 aa, synthetic construct
  REGION 1..147: note = Synthetic polypeptide
EVQLLESGGGLVQPGGSLRLSCAASGFTFSDYAMKWVRQAPGKGLEWVSSISSSGGVTQYADSVKGRFTISRDNSKNTLYLQMNSLRAEDTAVYYCAREEDYSSSWYSRRFDYYYGMDVWGQGTTVTVSSASTKGPSVFPLAPSSKS

SEQ ID NO: 279 - protein, 107 aa, synthetic construct
  REGION 1..107: note = Synthetic polypeptide
QDIQMTQSPSTLSASVGDRVTITCRASQSISSWLAWYQQKPGKAPNLLIYKASTLESGVPSRFSGSGSGTEFTLTISSLQPDDFATYYCQQYNTYWTFGQGTKVEIK

SEQ ID NO: 280 - protein, 139 aa, synthetic construct
  REGION 1..139: note = Synthetic polypeptide
EVQLLESGGGLVQPGGSLRLSCAASGFTFSHYIMMWVRQAPGKGLEWVSGIYSSGGITVYADSVKGRFTISRDNSKNTLYLQMNSLRAEDTAVYYCAYRRTGIPRRDAFDIWGQGTMVTVSSASTKGPSVFPLAPSSKS

SEQ ID NO: 281 - protein, 108 aa, synthetic construct; identical to SEQ ID NO: 265
  REGION 1..108: note = Synthetic polypeptide

SEQ ID NO: 282 - protein, 143 aa, synthetic construct
  REGION 1..143: note = Synthetic polypeptide
EVQLLESGGGLVQPGGSLRLSCAASGFTFSAYSMIWVRQAPGKGLEWVSYIRPSGGRTTYADSVKGRFTISRDNSKNTLYLQMNSLRAEDTAVYYCARGGLLLWSRELKSNYFDYWGQGTLVTVSSASTKGPSVFPLAPSSKS

SEQ ID NO: 283 - protein, 108 aa, synthetic construct; identical to SEQ ID NO: 265
  REGION 1..108: note = Synthetic polypeptide

SEQ ID NO: 284 - protein, 143 aa, synthetic construct
  REGION 1..143: note = Synthetic polypeptide
EVQLLESGGGLVQPGGSLRLSCAASGFTFSAYSMIWVRQAPGKGLEWVSYIRPSGGRTTYADSVKGRFTISRDNSKNTLYLQMNSLRAEDTAVYYCARGGLLLWMRELKSNYFDYWGQGTLVTVSSASTKGPSVFPLAPSSKS

SEQ ID NO: 285 - protein, 108 aa, synthetic construct; identical to SEQ ID NO: 265
  REGION 1..108: note = Synthetic polypeptide

SEQ ID NO: 286 - protein, 143 aa, synthetic construct
  REGION 1..143: note = Synthetic polypeptide
EVQLLESGGGLVQPGGSLRLSCAASGFTFSAYSMIWVRQAPGKGLEWVSYIRPSGGRTTYADSVKGRFTISRDNSKNTLYLQMNSLRAEDTAVYYCARGGLLLWGRELKSNYFDYWGQGTLVTVSSASTKGPSVFPLAPSSKS

SEQ ID NO: 287 - protein, 108 aa, synthetic construct; identical to SEQ ID NO: 265
  REGION 1..108: note = Synthetic polypeptide

SEQ ID NO: 288 - protein, 143 aa, synthetic construct
  REGION 1..143: note = Synthetic polypeptide
EVQLLESGGGLVQPGGSLRLSCAASGFTFSAYSMIWVRQAPGKGLEWVSYIRPSGGRTTYADSVKGRFTISRDNSKNTLYLQMNSLRAEDTAVYYCARGGLLLWNRELKSNYFDYWGQGTLVTVSSASTKGPSVFPLAPSSKS

SEQ ID NO: 289 - protein, 108 aa, synthetic construct; identical to SEQ ID NO: 265
  REGION 1..108: note = Synthetic polypeptide

SEQ ID NO: 290 - protein, 143 aa, synthetic construct
  REGION 1..143: note = Synthetic polypeptide
EVQLLESGGGLVQPGGSLRLSCAASGFTFSAYSMIWVRQAPGKGLEWVSYIRPSGGRTTYADSVKGRFTISRDNSKNTLYLQMNSLRAEDTAVYYCARGGLLLWDRELKSNYFDYWGQGTLVTVSSASTKGPSVFPLAPSSKS

SEQ ID NO: 291 - protein, 108 aa, synthetic construct; identical to SEQ ID NO: 265
  REGION 1..108: note = Synthetic polypeptide

SEQ ID NO: 292 - protein, 143 aa, synthetic construct
  REGION 1..143: note = Synthetic polypeptide
EVQLLESGGGLVQPGGSLRLSCAASGFTFSAYSMIWVRQAPGKGLEWVSYIRPSGGRTTYADSVKGRFTISRDNSKNTLYLQMNSLRAEDTAVYYCARGGLLLWQRELKSNYFDYWGQGTLVTVSSASTKGPSVFPLAPSSKS

SEQ ID NO: 293 - protein, 108 aa, synthetic construct; identical to SEQ ID NO: 265
  REGION 1..108: note = Synthetic polypeptide

SEQ ID NO: 294 - protein, 143 aa, synthetic construct
  REGION 1..143: note = Synthetic polypeptide
EVQLLESGGGLVQPGGSLRLSCAASGFTFSAYSMIWVRQAPGKGLEWVSYIRPSGGRTTYADSVKGRFTISRDNSKNTLYLQMNSLRAEDTAVYYCARGGLLLWTRELKSNYFDYWGQGTLVTVSSASTKGPSVFPLAPSSKS

SEQ ID NO: 295 - protein, 108 aa, synthetic construct; identical to SEQ ID NO: 265
  REGION 1..108: note = Synthetic polypeptide

SEQ ID NO: 296 - protein, 143 aa, synthetic construct
  REGION 1..143: note = Synthetic polypeptide
EVQLLESGGGLVQPGGSLRLSCAASGFTFSAYSMIWVRQAPGKGLEWVSYIRPSGGRTTYADSVKGRFTISRDNSKNTLYLQMNSLRAEDTAVYYCARGGLLLWARELKSNYFDYWGQGTLVTVSSASTKGPSVFPLAPSSKS

SEQ ID NO: 297 - protein, 108 aa, synthetic construct; identical to SEQ ID NO: 265
  REGION 1..108: note = Synthetic polypeptide

SEQ ID NO: 298 - protein, 143 aa, synthetic construct
  REGION 1..143: note = Synthetic polypeptide
EVQLLESGGGLVQPGGSLRLSCAASGFTFSAYSMIWVRQAPGKGLEWVSYIRPSGGRTTYADSVKGRFTISRDNSKNTLYLQMNSLRAEDTAVYYCARGGLLLWERELKSNYFDYWGQGTLVTVSSASTKGPSVFPLAPSSKS

SEQ ID NO: 299 - protein, 11 aa, synthetic construct
  REGION 1..11: note = Synthetic peptide
RASQSISMYLN

SEQ ID NO: 300 - protein, 7 aa, synthetic construct
  REGION 1..7: note = Synthetic peptide
GTSSLQS

SEQ ID NO: 301 - protein, 9 aa, synthetic construct
  REGION 1..9: note = Synthetic peptide
QQSYSAPWT

SEQ ID NO: 302 - protein, 5 aa, synthetic construct
  REGION 1..5: note = Synthetic peptide
LYQMT

SEQ ID NO: 303 - protein, 17 aa, synthetic construct
  REGION 1..17: note = Synthetic peptide
GIWPSGGFTDYADSVKG

SEQ ID NO: 304 - protein, 10 aa, synthetic construct
  REGION 1..10: note = Synthetic peptide
VSTAVADNDY

SEQ ID NO: 305 - protein, 11 aa, synthetic construct
  REGION 1..11: note = Synthetic peptide
RASQRISFYLN

SEQ ID NO: 306 - protein, 7 aa, synthetic construct
  REGION 1..7: note = Synthetic peptide
GASSLQS

SEQ ID NO: 307 - protein, 9 aa, synthetic construct
  REGION 1..9: note = Synthetic peptide
QQTFSTPNT

SEQ ID NO: 308 - protein, 5 aa, synthetic construct
  REGION 1..5: note = Synthetic peptide
PYPMQ

SEQ ID NO: 309 - protein, 17 aa, synthetic construct
  REGION 1..17: note = Synthetic peptide
SISSSGGMTEYADSVKG

SEQ ID NO: 310 - protein, 12 aa, synthetic construct
  REGION 1..12: note = Synthetic peptide
DDYGGKGGAFDI

SEQ ID NO: 311 - protein, 11 aa, synthetic construct
  REGION 1..11: note = Synthetic peptide
RASQSISSYLN

SEQ ID NO: 312 - protein, 7 aa, synthetic construct
  REGION 1..7: note = Synthetic peptide
AASSLQS

SEQ ID NO: 313 - protein, 9 aa, synthetic construct
  REGION 1..9: note = Synthetic peptide
QQSYSTLWT

SEQ ID NO: 314 - protein, 5 aa, synthetic construct
  REGION 1..5: note = Synthetic peptide
KYFMG

SEQ ID NO: 315 - protein, 17 aa, synthetic construct
  REGION 1..17: note = Synthetic peptide
VIGSSGGWTSYADSVKG

SEQ ID NO: 316 - protein, 10 aa, synthetic construct
  REGION 1..10: note = Synthetic peptide
VSTAVADNDY

SEQ ID NO: 317 - protein, 11 aa, synthetic construct
  REGION 1..11: note = Synthetic peptide
RASQSISSYLN

SEQ ID NO: 318 - protein, 7 aa, synthetic construct
  REGION 1..7: note = Synthetic peptide
GASSLQS

SEQ ID NO: 319 - protein, 8 aa, synthetic construct
  REGION 1..8: note = Synthetic peptide
QQSYTRWT

SEQ ID NO: 320 - protein, 5 aa, synthetic construct
  REGION 1..5: note = Synthetic peptide
RYHMV

SEQ ID NO: 321 - protein, 17 aa, synthetic construct
  REGION 1..17: note = Synthetic peptide
SISPSGGWTNYADSVKG

SEQ ID NO: 322 - protein, 11 aa, synthetic construct
  REGION 1..11: note = Synthetic peptide
EMATIAGQFDP

SEQ ID NO: 323 - protein, 11 aa, synthetic construct
  REGION 1..11: note = Synthetic peptide
RASQSISTYLN

SEQ ID NO: 324 - protein, 7 aa, synthetic construct
  REGION 1..7: note = Synthetic peptide
NAFSMER

SEQ ID NO: 325 - protein, 9 aa, synthetic construct
  REGION 1..9: note = Synthetic peptide
QQSYTTPTT

SEQ ID NO: 326 - protein, 5 aa, synthetic construct
  REGION 1..5: note = Synthetic peptide
RYRMV

SEQ ID NO: 327 - protein, 17 aa, synthetic construct
  REGION 1..17: note = Synthetic peptide
SIYPSGGMTAYADSVKG

SEQ ID NO: 328 - protein, 11 aa, synthetic construct
  REGION 1..11: note = Synthetic peptide
DAVGIGDAFDI

SEQ ID NO: 329 - protein, 11 aa, synthetic construct
  REGION 1..11: note = Synthetic peptide
SGDKLGDKYTS

SEQ ID NO: 330 - protein, 7 aa, synthetic construct
  REGION 1..7: note = Synthetic peptide
QDSKRPS

SEQ ID NO: 331 - protein, 8 aa, synthetic construct
  REGION 1..8: note = Synthetic peptide
QAWDSSTV

SEQ ID NO: 332 - protein, 5 aa, synthetic construct
  REGION 1..5: note = Synthetic peptide
YYPMQ

SEQ ID NO: 333 - protein, 17 aa, synthetic construct
  REGION 1..17: note = Synthetic peptide
YIYPSGGLTSYADSVKG

SEQ ID NO: 334 - protein, 12 aa, synthetic construct
  REGION 1..12: note = Synthetic peptide
LFYGSGSVGFEY

SEQ ID NO: 335 - protein, 11 aa, synthetic construct
  REGION 1..11: note = Synthetic peptide
RASQDISSWLV

SEQ ID NO: 336 - protein, 7 aa, synthetic construct
  REGION 1..7: note = Synthetic peptide
DASNLQS

SEQ ID NO: 337 - protein, 9 aa, synthetic construct
  REGION 1..9: note = Synthetic peptide
QQADGFPLT

SEQ ID NO: 338 - protein, 5 aa, synthetic construct
  REGION 1..5: note = Synthetic peptide
LYNMN

SEQ ID NO: 339 - protein, 17 aa, synthetic construct
  REGION 1..17: note = Synthetic peptide
SISPSGGFTDYADSVKG

SEQ ID NO: 340 - protein, 9 aa, synthetic construct
  REGION 1..9: note = Synthetic peptide
DLDLGILDY

SEQ ID NO: 341 - protein, 11 aa, synthetic construct
  REGION 1..11: note = Synthetic peptide
RASQSISSYLN

SEQ ID NO: 342 - protein, 7 aa, synthetic construct
  REGION 1..7: note = Synthetic peptide
AASSLQS

SEQ ID NO: 343 - protein, 10 aa, synthetic construct
  REGION 1..10: note = Synthetic peptide
QQSYSTLMYT

SEQ ID NO: 344 - protein, 5 aa, synthetic construct
  REGION 1..5: note = Synthetic peptide
HYFMT

SEQ ID NO: 345 - protein, 17 aa, synthetic construct
  REGION 1..17: note = Synthetic peptide
SIVPSGGMTQYADSVKG

SEQ ID NO: 346 - protein, 10 aa, synthetic construct
  REGION 1..10: note = Synthetic peptide
DSYSSSWFDI

SEQ ID NO: 347 - protein, 11 aa, synthetic construct
  REGION 1..11: note = Synthetic peptide
RASQGVSYYLA

SEQ ID NO: 348 - protein, 7 aa, synthetic construct
  REGION 1..7: note = Synthetic peptide
GASSLQS

SEQ ID NO: 349 - protein, 9 aa, synthetic construct
  REGION 1..9: note = Synthetic peptide
QQYNTYPPT

SEQ ID NO: 350 - protein, 5 aa, synthetic construct
  REGION 1..5: note = Synthetic peptide
LYEML

SEQ ID NO: 351 - protein, 17 aa, synthetic construct
  REGION 1..17: note = Synthetic peptide
VIYPSGGYTDYADSVKG

SEQ ID NO: 352 - protein, 10 aa, synthetic construct
  REGION 1..10: note = Synthetic peptide
SFSGFGEIDY

SEQ ID NO: 353 - protein, 11 aa, synthetic construct
  REGION 1..11: note = Synthetic peptide
RASQYISTYLN

SEQ ID NO: 354 - protein, 7 aa, synthetic construct
  REGION 1..7: note = Synthetic peptide
GTSSLQS

SEQ ID NO: 355 - protein, 9 aa, synthetic construct
  REGION 1..9: note = Synthetic peptide
QQSFTTPFT

SEQ ID NO: 356 - protein, 5 aa, synthetic construct
  REGION 1..5: note = Synthetic peptide
GYWMG

SEQ ID NO: 357 - protein, 17 aa, synthetic construct
  REGION 1..17: note = Synthetic peptide
SISSSGGWTQYADSVKG

SEQ ID NO: 358 - protein, 12 aa, synthetic construct
  REGION 1..12: note = Synthetic peptide
DDEIAAGGAFDI

SEQ ID NO: 359 - protein, 11 aa, synthetic construct
  REGION 1..11: note = Synthetic peptide
RASQNIDIYLN

SEQ ID NO: 360 - protein, 7 aa, synthetic construct
  REGION 1..7: note = Synthetic peptide
GAYNLQS

SEQ ID NO: 361 - protein, 8 aa, synthetic construct
  REGION 1..8: note = Synthetic peptide
QQSYGTPV

SEQ ID NO: 362 - protein, 5 aa, synthetic construct
  REGION 1..5: note = Synthetic peptide
GYFMM

SEQ ID NO: 363 - protein, 17 aa, synthetic construct
  REGION 1..17: note = Synthetic peptide
SIYSSGGYTDYADSVKG

SEQ ID NO: 364 - protein, 10 aa, synthetic construct
  REGION 1..10: note = Synthetic peptide
EVAGTYAFDI

SEQ ID NO: 365 - protein, 11 aa, synthetic construct
  REGION 1..11: note = Synthetic peptide
RASQRISTYLN

SEQ ID NO: 366 - protein, 7 aa, synthetic construct
  REGION 1..7: note = Synthetic peptide
GASSLQS

SEQ ID NO: 367 - protein, 9 aa, synthetic construct
  REGION 1..9: note = Synthetic peptide
QQSYNTPRT

SEQ ID NO: 368 - protein, 5 aa, synthetic construct
  REGION 1..5: note = Synthetic peptide
AYEMW

SEQ ID NO: 369 - protein, 17 aa, synthetic construct
  REGION 1..17: note = Synthetic peptide
YIGSSGGSTSYADSVKG

SEQ ID NO: 370 - protein, 11 aa, synthetic construct
  REGION 1..11: note = Synthetic peptide
GNSSSFDAFDI

SEQ ID NO: 371 - protein, 11 aa, synthetic construct
  REGION 1..11: note = Synthetic peptide
RASQSISIYVN

SEQ ID NO: 372 - protein, 7 aa, synthetic construct
  REGION 1..7: note = Synthetic peptide
AASSLQR

SEQ ID NO: 373 - protein, 9 aa, synthetic construct
  REGION 1..9: note = Synthetic peptide
QQSFSTPLT

SEQ ID NO: 374 - protein, 5 aa, synthetic construct
  REGION 1..5: note = Synthetic peptide
HYGMV

SEQ ID NO: 375 - protein, 17 aa, synthetic construct
  REGION 1..17: note = Synthetic peptide
YIVPSGGLTYYADSVKG

SEQ ID NO: 376 - protein, 10 aa, synthetic construct
  REGION 1..10: note = Synthetic peptide
VDYTGDGLGY

SEQ ID NO: 377 - protein, 11 aa, synthetic construct
  REGION 1..11: note = Synthetic peptide
RASQGISSYLN

SEQ ID NO: 378 - protein, 7 aa, synthetic construct
  REGION 1..7: note = Synthetic peptide
GASSLQS

SEQ ID NO: 379 - protein, 9 aa, synthetic construct
  REGION 1..9: note = Synthetic peptide
QESYSTLFT

SEQ ID NO: 380 - protein, 5 aa, synthetic construct
  REGION 1..5: note = Synthetic peptide
LYPMQ

SEQ ID NO: 381 - protein, 17 aa, synthetic construct
  REGION 1..17: note = Synthetic peptide
SIGSSGGMTFYADSVKG

SEQ ID NO: 382 - protein, 11 aa, synthetic construct
  REGION 1..11: note = Synthetic peptide
EVGAAGFAFDI

SEQ ID NO: 383 - protein, 11 aa, synthetic construct
  REGION 1..11: note = Synthetic peptide
RASRTISFYLN

SEQ ID NO: 384 - protein, 7 aa, synthetic construct
  REGION 1..7: note = Synthetic peptide
GGSSLHS

SEQ ID NO: 385 - protein, 9 aa, synthetic construct
  REGION 1..9: note = Synthetic peptide
QQSFSSPWT

SEQ ID NO: 386 - protein, 5 aa, synthetic construct
  REGION 1..5: note = Synthetic peptide
WYKMM

SEQ ID NO: 387 - protein, 17 aa, synthetic construct
  REGION 1..17: note = Synthetic peptide
SIYPSGGWTNYADSVKG

SEQ ID NO: 388 - protein, 11 aa, synthetic construct
  REGION 1..11: note = Synthetic peptide
GSPWGDDAFDI

SEQ ID NO: 389 - protein, 11 aa, synthetic construct
  REGION 1..11: note = Synthetic peptide
RASQSISGYLN

SEQ ID NO: 390 - protein, 7 aa, synthetic construct
  REGION 1..7: note = Synthetic peptide
AASNLQT

SEQ ID NO: 391 - protein, 9 aa, synthetic construct
  REGION 1..9: note = Synthetic peptide
QQSHTPPKT

SEQ ID NO: 392 - protein, 5 aa, synthetic construct
  REGION 1..5: note = Synthetic peptide
EYDMM

SEQ ID NO: 393 - protein, 17 aa, synthetic construct
  REGION 1..17: note = Synthetic peptide
SIGSSGGMTYYADSVKG

SEQ ID NO: 394 - protein, 10 aa, synthetic construct
  REGION 1..10: note = Synthetic peptide
DQVAAAAIDY

SEQ ID NO: 395 - protein, 11 aa, synthetic construct
  REGION 1..11: note = Synthetic peptide
RASQSISSYLN

SEQ ID NO: 396 - protein, 7 aa, synthetic construct
  REGION 1..7: note = Synthetic peptide
AASSLQS

SEQ ID NO: 397 - protein, 10 aa, synthetic construct
  REGION 1..10: note = Synthetic peptide
QQSYSTPPYT

SEQ ID NO: 398 - protein, 5 aa, synthetic construct
  REGION 1..5: note = Synthetic peptide
PYAMT

SEQ ID NO: 399 - protein, 17 aa, synthetic construct
  REGION 1..17: note = Synthetic peptide
VIYPSGGFTDYADSVKG

SEQ ID NO: 400 - protein, 11 aa, synthetic construct
  REGION 1..11: note = Synthetic peptide
ASGSYLDAFDI

SEQ ID NO: 401 - protein, 11 aa, synthetic construct
  REGION 1..11: note = Synthetic peptide
RASQSISSYLN

SEQ ID NO: 402 - protein, 7 aa, synthetic construct
  REGION 1..7: note = Synthetic peptide
AASSLQS

SEQ ID NO: 403 - protein, 9 aa, synthetic construct
  REGION 1..9: note = Synthetic peptide
QQTYTTPWT

SEQ ID NO: 404 - protein, 5 aa, synthetic construct
  REGION 1..5: note = Synthetic peptide
SYPMG

SEQ ID NO: 405 - protein, 17 aa, synthetic construct
  REGION 1..17: note = Synthetic peptide
RISSSGGMTIYADSVKG

SEQ ID NO: 406 - protein, 9 aa, synthetic construct
  REGION 1..9: note = Synthetic peptide
DDWNVGMDV

SEQ ID NO: 407 - protein, 11 aa, synthetic construct
  REGION 1..11: note = Synthetic peptide
RASQSINTYLN

SEQ ID NO: 408 - protein, 7 aa, synthetic construct
  REGION 1..7: note = Synthetic peptide
AASTLES

SEQ ID NO: 409 - protein, 9 aa, synthetic construct
  REGION 1..9: note = Synthetic peptide
QQSYSTPYT

SEQ ID NO: 410 - protein, 5 aa, synthetic construct
  REGION 1..5: note = Synthetic peptide
DYDME

SEQ ID NO: 411 - protein, 17 aa, synthetic construct
  REGION 1..17: note = Synthetic peptide
SISPSGGSTIYADSVKG

SEQ ID NO: 412 - protein, 9 aa, synthetic construct
  REGION 1..9: note = Synthetic peptide
QGLLTAFDI

SEQ ID NO: 413 - protein, 11 aa, synthetic construct
  REGION 1..11: note = Synthetic peptide
RASQSISSYLN

SEQ ID NO: 414 - protein, 7 aa, synthetic construct
  REGION 1..7: note = Synthetic peptide
AASSLQS

SEQ ID NO: 415 - protein, 9 aa, synthetic construct
  REGION 1..9: note = Synthetic peptide
QQSYSTPIT

SEQ ID NO: 416 - protein, 5 aa, synthetic construct
  REGION 1..5: note = Synthetic peptide
YYTML

SEQ ID NO: 417 - protein, 17 aa, synthetic construct
  REGION 1..17: note = Synthetic peptide
SIYPSGGFTMYADSVKG

SEQ ID NO: 418 - protein, 10 aa, synthetic construct
  REGION 1..10: note = Synthetic peptide
VDTAMAMIDY

SEQ ID NO: 419 - protein, 11 aa, synthetic construct
  REGION 1..11: note = Synthetic peptide
RASRSIATYLN

SEQ ID NO: 420 - protein, 7 aa, synthetic construct
  REGION 1..7: note = Synthetic peptide
GASTLQS

SEQ ID NO: 421 - protein, 9 aa, synthetic construct
  REGION 1..9: note = Synthetic peptide
QQSFSDPYT

SEQ ID NO: 422 - protein, 5 aa, synthetic construct
  REGION 1..5: note = Synthetic peptide
AYMMI

SEQ ID NO: 423 - protein, 17 aa, synthetic construct
  REGION 1..17: note = Synthetic peptide
VIYPSGGVTMYADSVKG

SEQ ID NO: 424 - protein, 11 aa, synthetic construct
  REGION 1..11: note = Synthetic peptide
GTVGASDAFDI

SEQ ID NO: 425 - protein, 11 aa, synthetic construct
  REGION 1..11: note = Synthetic peptide
SGDKLGNRYTS

SEQ ID NO: 426 - protein, 7 aa, synthetic construct
  REGION 1..7: note = Synthetic peptide
QDNKRPS

SEQ ID NO: 427 - protein, 9 aa, synthetic construct
  REGION 1..9: note = Synthetic peptide
QALDSNTYV

SEQ ID NO: 428 - protein, 5 aa, synthetic construct
  REGION 1..5: note = Synthetic peptide
WYSMG

SEQ ID NO: 429 - protein, 17 aa, synthetic construct
  REGION 1..17: note = Synthetic peptide
YIVPSGGYTMYADSVKG

SEQ ID NO: 430 - protein, 13 aa, synthetic construct
  REGION 1..13: note = Synthetic peptide
DPGVSYYYYGMDV

SEQ ID NO: 431 - protein, 11 aa, synthetic construct
  REGION 1..11: note = Synthetic peptide
RASQSISSYLN

SEQ ID NO: 432 - protein, 7 aa, synthetic construct
  REGION 1..7: note = Synthetic peptide
AASSLQS

SEQ ID NO: 433 - protein, 9 aa, synthetic construct
  REGION 1..9: note = Synthetic peptide
QQSYSTPPT

SEQ ID NO: 434 - protein, 5 aa, synthetic construct
  REGION 1..5: note = Synthetic peptide
AYTMW

SEQ ID NO: 435 - protein, 17 aa, synthetic construct
  REGION 1..17: note = Synthetic peptide
SIWPSGGSTFYADSVKG

SEQ ID NO: 436 - protein, 11 aa, synthetic construct
  REGION 1..11: note = Synthetic peptide
TYDSSAGEVDY

SEQ ID NO: 437 - protein, 11 aa, synthetic construct
  REGION 1..11: note = Synthetic peptide
RASQRISFYLN

SEQ ID NO: 438 - protein, 7 aa, synthetic construct
  REGION 1..7: note = Synthetic peptide
GASSLQS

SEQ ID NO: 439 - protein, 9 aa, synthetic construct
  REGION 1..9: note = Synthetic peptide
QQTFSTPNT

SEQ ID NO: 440 - protein, 5 aa, synthetic construct
  REGION 1..5: note = Synthetic peptide
PYPMQ

SEQ ID NO: 441 - protein, 17 aa, synthetic construct
  REGION 1..17: note = Synthetic peptide
SISSSGGMTEYADSVKG

SEQ ID NO: 442 - protein, 12 aa, synthetic construct
  REGION 1..12: note = Synthetic peptide
DDYGGKGGAFDI

SEQ ID NO: 443 - protein, 11 aa, synthetic construct
  REGION 1..11: note = Synthetic peptide
RASRDISVYLN

SEQ ID NO: 444 - protein, 7 aa, synthetic construct
  REGION 1..7: note = Synthetic peptide
GASSLQS

SEQ ID NO: 445 - protein, 9 aa, synthetic construct
  REGION 1..9: note = Synthetic peptide
QQSYSIPFT

SEQ ID NO: 446 - protein, 5 aa, synthetic construct
  REGION 1..5: note = Synthetic peptide
LYLMH

SEQ ID NO: 447 - protein, 17 aa, synthetic construct
  REGION 1..17: note = Synthetic peptide
SIYSSGGFTTYADSVKG

SEQ ID NO: 448 - protein, 8 aa, synthetic construct
  REGION 1..8: note = Synthetic peptide
DTDYGMDV

SEQ ID NO: 449 - protein, 11 aa, synthetic construct
  REGION 1..11: note = Synthetic peptide
RASQSISTYLN

SEQ ID NO: 450 - protein, 7 aa, synthetic construct
  REGION 1..7: note = Synthetic peptide
GASSLQS

SEQ ID NO: 451 - protein, 9 aa, synthetic construct
  REGION 1..9: note = Synthetic peptide
QQSFSTPWT

SEQ ID NO: 452 - protein, 5 aa, synthetic construct
  REGION 1..5: note = Synthetic peptide
WYEMS

SEQ ID NO: 453 - protein, 17 aa, synthetic construct
  REGION 1..17: note = Synthetic peptide
RIWPSGGVTMYADSVKG

SEQ ID NO: 454 - protein, 10 aa, synthetic construct
  REGION 1..10: note = Synthetic peptide
TSITTVGMDV

SEQ ID NO: 455 - protein, 11 aa, synthetic construct
  REGION 1..11: note = Synthetic peptide
RASQSISIYLN

SEQ ID NO: 456 - protein, 7 aa, synthetic construct
  REGION 1..7: note = Synthetic peptide
AASTLQS

SEQ ID NO: 457 - protein, 9 aa, synthetic construct
  REGION 1..9: note = Synthetic peptide
QQSHSIPPT

SEQ ID NO: 458 - protein, 5 aa, synthetic construct
  REGION 1..5: note = Synthetic peptide
MYPMM

SEQ ID NO: 459 - protein, 17 aa, synthetic construct
  REGION 1..17: note = Synthetic peptide
YISPSGGMTDYADSVKG

SEQ ID NO: 460 - protein, 10 aa, synthetic construct
  REGION 1..10: note = Synthetic peptide
VAGSSDAFDI

SEQ ID NO: 461 - protein, 16 aa, synthetic construct
  REGION 1..16: note = Synthetic peptide
RSSQSLLHSNGYNYLD

SEQ ID NO: 462 - protein, 7 aa, synthetic construct
  REGION 1..7: note = Synthetic peptide
LGSNRAS

SEQ ID NO: 463 - protein, 9 aa, synthetic construct
  REGION 1..9: note = Synthetic peptide
MQALQTPLT

SEQ ID NO: 464 - protein, 5 aa, synthetic construct
  REGION 1..5: note = Synthetic peptide
AYPMN

SEQ ID NO: 465 - protein, 17 aa, synthetic construct
  REGION 1..17: note = Synthetic peptide
RISSSGGNTSYADSVKG

SEQ ID NO: 466 - protein, 5 aa, synthetic construct
  REGION 1..5: note = Synthetic peptide
GYLGY

SEQ ID NO: 467 - protein, 11 aa, synthetic construct
  REGION 1..11: note = Synthetic peptide
RASQSISTYLN

SEQ ID NO: 468 - protein, 7 aa, synthetic construct
  REGION 1..7: note = Synthetic peptide
GASSLQS

SEQ ID NO: 469 - protein, 9 aa, synthetic construct
  REGION 1..9: note = Synthetic peptide
QQSYSDPYT

SEQ ID NO: 470 - protein, 5 aa, synthetic construct
  REGION 1..5: note = Synthetic peptide
LYRMF

SEQ ID NO: 471 - protein, 17 aa, synthetic construct
  REGION 1..17: note = Synthetic peptide
SIWSSGGPTMYADSVKG

SEQ ID NO: 472 - protein, 10 aa, synthetic construct
  REGION 1..10: note = Synthetic peptide
EYPSTYYFDY

SEQ ID NO: 473 - protein, 11 aa, synthetic construct
  REGION 1..11: note = Synthetic peptide
RASQTIDDDLI

SEQ ID NO: 474 - protein, 7 aa, synthetic construct
  REGION 1..7: note = Synthetic peptide
AASSLQS

SEQ ID NO: 475 - protein, 9 aa, synthetic construct
  REGION 1..9: note = Synthetic peptide
QQSYNIPRT

SEQ ID NO: 476 - protein, 5 aa, synthetic construct
  REGION 1..5: note = Synthetic peptide
NYDMM

SEQ ID NO: 477 - protein, 17 aa, synthetic construct
  REGION 1..17: note = Synthetic peptide
YISPSGGFTRYADSVKG

SEQ ID NO: 478 - protein, 15 aa, synthetic construct
  REGION 1..15: note = Synthetic peptide
DIYYYNWGPSHYFDS

SEQ ID NO: 479 - protein, 11 aa, synthetic construct
  REGION 1..11: note = Synthetic peptide
RASQSISGYIN

SEQ ID NO: 480 - protein, 7 aa, synthetic construct
  REGION 1..7: note = Synthetic peptide
AASSLQS

SEQ ID NO: 481 - protein, 9 aa, synthetic construct
  REGION 1..9: note = Synthetic peptide
QQYVSYPFT

SEQ ID NO: 482 - protein, 5 aa, synthetic construct
  REGION 1..5: note = Synthetic peptide
QYGMQ

SEQ ID NO: 483 - protein, 17 aa, synthetic construct
  REGION 1..17: note = Synthetic peptide
SIRSSGGATRYADSVKG

SEQ ID NO: 484 - protein, 12 aa, synthetic construct
  REGION 1..12: note = Synthetic peptide
DGYYDSSGYPDY

SEQ ID NO: 485 - protein, 11 aa, synthetic construct
  REGION 1..11: note = Synthetic peptide
RASQSIDTYLN

SEQ ID NO: 486 - protein, 5 aa, synthetic construct
  REGION 1..5: note = Synthetic peptide
DASNL

SEQ ID NO: 487 - protein, 9 aa, synthetic construct
  REGION 1..9: note = Synthetic peptide
QHYLYAPYS

SEQ ID NO: 488 - protein, 5 aa, synthetic construct
  REGION 1..5: note = Synthetic peptide
NYWMM

SEQ ID NO: 489 - protein, 17 aa, synthetic construct
  REGION 1..17: note = Synthetic peptide
GIGSSGGFTSYADSVKG

SEQ ID NO: 490 - protein, 11 aa, synthetic construct
  REGION 1..11: note = Synthetic peptide
GSYSDYGVFES

SEQ ID NO: 491 - protein, 11 aa, synthetic construct
  REGION 1..11: note = Synthetic peptide
RASQSISSYLN

SEQ ID NO: 492 - protein, 7 aa, synthetic construct
  REGION 1..7: note = Synthetic peptide
AASSLQS

SEQ ID NO: 493 - protein, 9 aa, synthetic construct
  REGION 1..9: note = Synthetic peptide
QQSYSTPPT

SEQ ID NO: 494 - protein, 5 aa, synthetic construct
  REGION 1..5: note = Synthetic peptide
TYEMY

SEQ ID NO: 495 - protein, 17 aa, synthetic construct
  REGION 1..17: note = Synthetic peptide
GIGSSGGMTMYADSVKG

SEQ ID NO: 496 - protein, 10 aa, synthetic construct
  REGION 1..10: note = Synthetic peptide
EQPGIAALQF

SEQ ID NO: 497 - protein, 11 aa, synthetic construct
  REGION 1..11: note = Synthetic peptide
RASQSISIYLT

SEQ ID NO: 498 - protein, 7 aa, synthetic construct
  REGION 1..7: note = Synthetic peptide
GAATLQT

SEQ ID NO: 499 - protein, 9 aa, synthetic construct
  REGION 1..9: note = Synthetic peptide
QQTFSLPRT

SEQ ID NO: 500 - protein, 5 aa, synthetic construct
  REGION 1..5: note = Synthetic peptide
MYHMN

SEQ ID NO: 501 - protein, 17 aa, synthetic construct
  REGION 1..17: note = Synthetic peptide
GIVSSGGVTFYADSVKG

SEQ ID NO: 502 - protein, 12 aa, synthetic construct
  REGION 1..12: note = Synthetic peptide
ITTVTTGGAFDI

SEQ ID NO: 503 - protein, 11 aa, synthetic construct
  REGION 1..11: note = Synthetic peptide
RTSQTINNYLN

SEQ ID NO: 504 - protein, 7 aa, synthetic construct
  REGION 1..7: note = Synthetic peptide
ATHTLES

SEQ ID NO: 505 - protein, 9 aa, synthetic construct
  REGION 1..9: note = Synthetic peptide
QQSFAFPYT

SEQ ID NO: 506 - protein, 5 aa, synthetic construct
  REGION 1..5: note = Synthetic peptide
WYTMG

SEQ ID NO: 507 - protein, 16 aa, synthetic construct
  REGION 1..16: note = Synthetic peptide
WIYFGGLTTYADSVKG

SEQ ID NO: 508 - protein, 10 aa, synthetic construct
  REGION 1..10: note = Synthetic peptide
LGGPLDAFDI

SEQ ID NO: 509 - protein, 11 aa, synthetic construct
  REGION 1..11: note = Synthetic peptide
RASRGIGTYLN

SEQ ID NO: 510 - protein, 7 aa, synthetic construct
  REGION 1..7: note = Synthetic peptide
AASSLET

SEQ ID NO: 511 - protein, 9 aa, synthetic construct
  REGION 1..9: note = Synthetic peptide
QESFTNVYN

SEQ ID NO: 512 - protein, 5 aa, synthetic construct
  REGION 1..5: note = Synthetic peptide
QYAMH

SEQ ID NO: 513 - protein, 17 aa, synthetic construct
  REGION 1..17: note = Synthetic peptide
SIYPSGGFTLYADSVKG

SEQ ID NO: 514 - protein, 11 aa, synthetic construct
  REGION 1..11: note = Synthetic peptide
GGWLAGGELLN

SEQ ID NO: 515 - protein, 11 aa, synthetic construct
  REGION 1..11: note = Synthetic peptide
RTSQGINHYLN

SEQ ID NO: 516 - protein, 7 aa, synthetic construct
  REGION 1..7: note = Synthetic peptide
AASELQT

SEQ ID NO: 517 - protein, 9 aa, synthetic construct
  REGION 1..9: note = Synthetic peptide
QQTYTSPYT

SEQ ID NO: 518 - protein, 5 aa, synthetic construct
  REGION 1..5: note = Synthetic peptide
LYNMT

SEQ ID NO: 519 - protein, 17 aa, synthetic construct
  REGION 1..17: note = Synthetic peptide
YIYPSGGGTHYADSVKG

SEQ ID NO: 520 - protein, 12 aa, synthetic construct
  REGION 1..12: note = Synthetic peptide
DTGFWSADAFDI

SEQ ID NO: 521 - protein, 11 aa, synthetic construct
  REGION 1..11: note = Synthetic peptide
RASQTISVYVN

SEQ ID NO: 522 - protein, 7 aa, synthetic construct
  REGION 1..7: note = Synthetic peptide
GASSLQS

SEQ ID NO: 523 - protein, 9 aa, synthetic construct
  REGION 1..9: note = Synthetic peptide
QQSYSIPFT

SEQ ID NO: 524 - protein, 5 aa, synthetic construct
  REGION 1..5: note = Synthetic peptide
QYPMN

SEQ ID NO: 525 - protein, 17 aa, synthetic construct
  REGION 1..17: note = Synthetic peptide
SISSSGGFTTYADSVKG

SEQ ID NO: 526 - protein, 9 aa, synthetic construct
  REGION 1..9: note = Synthetic peptide
EEQQGGFDY

SEQ ID NO: 527 - protein, 11 aa, synthetic construct
  REGION 1..11: note = Synthetic peptide
RASQSISRYLN

SEQ ID NO: 528 - protein, 7 aa, synthetic construct
  REGION 1..7: note = Synthetic peptide
AASTLET

SEQ ID NO: 529 - protein, 9 aa, synthetic construct
  REGION 1..9: note = Synthetic peptide
QQSYSTPYT

SEQ ID NO: 530 - protein, 5 aa, synthetic construct
  REGION 1..5: note = Synthetic peptide
WYYMG

SEQ ID NO: 531 - protein, 17 aa, synthetic construct
  REGION 1..17: note = Synthetic peptide
WIVSSGGLTLYADSVKG

SEQ ID NO: 532 - protein, 11 aa, synthetic construct
  REGION 1..11: note = Synthetic peptide
TTVTTGDAFDI

SEQ ID NO: 533 - protein, 11 aa, synthetic construct
  REGION 1..11: note = Synthetic peptide
RASQGIRNDLG

SEQ ID NO: 534 - protein, 7 aa, synthetic construct
  REGION 1..7: note = Synthetic peptide
AASILQS

SEQ ID NO: 535 - protein, 9 aa, synthetic construct
  REGION 1..9: note = Synthetic peptide
LQDYEYPLT

SEQ ID NO: 536 - protein, 5 aa, synthetic construct
  REGION 1..5: note = Synthetic peptide
LYSMY

SEQ ID NO: 537 - protein, 17 aa, synthetic construct
  REGION 1..17: note = Synthetic peptide
RIRPSGGGTVYADSVKG

SEQ ID NO: 538 - protein, 9 aa, synthetic construct
  REGION 1..9: note = Synthetic peptide
DPLYSSGDV

SEQ ID NO: 539 - protein, 11 aa, synthetic construct
  REGION 1..11: note = Synthetic peptide
RASQSIGIYLN

SEQ ID NO: 540 - protein, 7 aa, synthetic construct
  REGION 1..7: note = Synthetic peptide
GASSLQS

SEQ ID NO: 541 - protein, 9 aa, synthetic construct
  REGION 1..9: note = Synthetic peptide
QHSYSTPFT

SEQ ID NO: 542 - protein, 5 aa, synthetic construct
  REGION 1..5: note = Synthetic peptide
SYAMV

SEQ ID NO: 543 - protein, 17 aa, synthetic construct
  REGION 1..17: note = Synthetic peptide
SIGSSGGFTLYADSVKG

SEQ ID NO: 544 - protein, 11 aa, synthetic construct
  REGION 1..11: note = Synthetic peptide
MNLGGGDAFDI

SEQ ID NO: 545 - protein, 11 aa, synthetic construct
  REGION 1..11: note = Synthetic peptide
SGDKLGEKYVS

SEQ ID NO: 546 - protein, 7 aa, synthetic construct
  REGION 1..7: note = Synthetic peptide
QDNKRPS

SEQ ID NO: 547 - protein, 9 aa, synthetic construct
  REGION 1..9: note = Synthetic peptide
QAWDSYTVV

SEQ ID NO: 548 - protein, 5 aa, synthetic construct
  REGION 1..5: note = Synthetic peptide
DYEMH

SEQ ID NO: 549 - protein, 17 aa, synthetic construct
  REGION 1..17: note = Synthetic peptide
GISPSGGKTQYADSVKG

SEQ ID NO: 550 - protein, 16 aa, synthetic construct
  REGION 1..16: note = Synthetic peptide
DLKWGGRGSPDWYFDL

SEQ ID NO: 551 - protein, 11 aa, synthetic construct
  REGION 1..11: note = Synthetic peptide
RASQSISSYLN

SEQ ID NO: 552 - protein, 7 aa, synthetic construct
  REGION 1..7: note = Synthetic peptide
AASSLQS

SEQ ID NO: 553 - protein, 9 aa, synthetic construct
  REGION 1..9: note = Synthetic peptide
QQSYSTPPT

SEQ ID NO: 554 - protein, 5 aa, synthetic construct
  REGION 1..5: note = Synthetic peptide
NYPMD

SEQ ID NO: 555 - protein, 17 aa, synthetic construct
  REGION 1..17: note = Synthetic peptide
SISSSGGWTNYADSVKG

SEQ ID NO: 556 - protein, 11 aa, synthetic construct
  REGION 1..11: note = Synthetic peptide
DTSGSYLGFDY

SEQ ID NO: 557 - protein, 11 aa, synthetic construct
  REGION 1..11: note = Synthetic peptide
RASQSISTYLN

SEQ ID NO: 558 - protein, 7 aa, synthetic construct
  REGION 1..7: note = Synthetic peptide
GAFSLQS

SEQ ID NO: 559 - protein, 9 aa, synthetic construct
  REGION 1..9: note = Synthetic peptide
QQSHSTPPT

SEQ ID NO: 560 - protein, 5 aa, synthetic construct
  REGION 1..5: note = Synthetic peptide
QYKML

SEQ ID NO: 561 - protein, 17 aa, synthetic construct
  REGION 1..17: note = Synthetic peptide
GIGPSGGLTAYADSVKG

SEQ ID NO: 562 - protein, 11 aa, synthetic construct
  REGION 1..11: note = Synthetic peptide
APWFGELGMDV

SEQ ID NO: 563 - protein, 11 aa, synthetic construct
  REGION 1..11: note = Synthetic peptide
RASQSISAYLN

SEQ ID NO: 564 - protein, 8 aa, synthetic construct
  REGION 1..8: note = Synthetic peptide
YGVGSLQS

SEQ ID NO: 565 - protein, 9 aa, synthetic construct
  REGION 1..9: note = Synthetic peptide
QQGYTTPVT

SEQ ID NO: 566 - protein, 5 aa, synthetic construct
  REGION 1..5: note = Synthetic peptide
WYRMD

SEQ ID NO: 567 - protein, 17 aa, synthetic construct
  REGION 1..17: note = Synthetic peptide
SIWPSGGLTSYADSVKG

SEQ ID NO: 568 - protein, 11 aa, synthetic construct
  REGION 1..11: note = Synthetic peptide
GWAPGGDAFDI

SEQ ID NO: 569 - protein, 11 aa, synthetic construct
  REGION 1..11: note = Synthetic peptide
RASQSISSYLN

SEQ ID NO: 570 - protein, 7 aa, synthetic construct
  REGION 1..7: note = Synthetic peptide
AASSLQS

SEQ ID NO: 571 - protein, 9 aa, synthetic construct
  REGION 1..9: note = Synthetic peptide
QQSYSTPYT

SEQ ID NO: 572 - protein, 5 aa, synthetic construct
  REGION 1..5: note = Synthetic peptide
DYTMW

SEQ ID NO: 573 - protein, 17 aa, synthetic construct
  REGION 1..17: note = Synthetic peptide
SISSSGGITFYADSVKG

SEQ ID NO: 574 - protein, 12 aa, synthetic construct
  REGION 1..12: note = Synthetic peptide
SADTAMGGAFDI

SEQ ID NO: 575 - protein, 11 aa, synthetic construct
  REGION 1..11: note = Synthetic peptide
SGDKLGDEYAA

SEQ ID NO: 576 - protein, 7 aa, synthetic construct
  REGION 1..7: note = Synthetic peptide
QDRKRPS

SEQ ID NO: 577 - protein, 9 aa, synthetic construct
  REGION 1..9: note = Synthetic peptide
QAWGKRNVV

SEQ ID NO: 578 - protein, 5 aa, synthetic construct
  REGION 1..5: note = Synthetic peptide
WYQMM

SEQ ID NO: 579 - protein, 17 aa, synthetic construct
  REGION 1..17: note = Synthetic peptide
SISPSGGITEYADSVKG

SEQ ID NO: 580 - protein, 13 aa, synthetic construct
  REGION 1..13: note = Synthetic peptide
DRSSGWYYYGMDV

SEQ ID NO: 581 - protein, 11 aa, synthetic construct
  REGION 1..11: note = Synthetic peptide
RASQSISSYLN

SEQ ID NO: 582 - protein, 7 aa, synthetic construct
  REGION 1..7: note = Synthetic peptide
AASSLQS

SEQ ID NO: 583 - protein, 9 aa, synthetic construct
  REGION 1..9: note = Synthetic peptide
QQSYSTPRT

SEQ ID NO: 584 - protein, 5 aa, synthetic construct
  REGION 1..5: note = Synthetic peptide
SYMMH

SEQ ID NO: 585 - protein, 17 aa, synthetic construct
  REGION 1..17: note = Synthetic peptide
GIYPSGGWTDYADSVKG

SEQ ID NO: 586 - protein, 10 aa, synthetic construct
  REGION 1..10: note = Synthetic peptide
LVAGLDAFDI

SEQ ID NO: 587 - protein, 11 aa, synthetic construct
  REGION 1..11: note = Synthetic peptide
RASQSISSYLN

SEQ ID NO: 588 - protein, 7 aa, synthetic construct
  REGION 1..7: note = Synthetic peptide
AASSLQS

SEQ ID NO: 589 - protein, 9 aa, synthetic construct
  REGION 1..9: note = Synthetic peptide
QQSYSTPPT

SEQ ID NO: 590 - protein, 5 aa, synthetic construct
  REGION 1..5: note = Synthetic peptide
WYPMT

SEQ ID NO: 591 - protein, 17 aa, synthetic construct
  REGION 1..17: note = Synthetic peptide
SIGPSGGQTIYADSVKG

SEQ ID NO: 592 - protein, 11 aa, synthetic construct
  REGION 1..11: note = Synthetic peptide
EYGDYGGGFDP

SEQ ID NO: 593 - protein, 11 aa, synthetic construct
  REGION 1..11: note = Synthetic peptide
RASQGISSYLA

SEQ ID NO: 594 - protein, 7 aa, synthetic construct
  REGION 1..7: note = Synthetic peptide
AASSLQS

SEQ ID NO: 595 - protein, 9 aa, synthetic construct
  REGION 1..9: note = Synthetic peptide
QQSYNTLRT

SEQ ID NO: 596 - protein, 5 aa, synthetic construct
  REGION 1..5: note = Synthetic peptide
SYHMM

SEQ ID NO: 597 - protein, 17 aa, synthetic construct
  REGION 1..17: note = Synthetic peptide
SIYPSGGATMYADSVKG

SEQ ID NO: 598 - protein, 13 aa, synthetic construct
  REGION 1..13: note = Synthetic peptide
DGYHYGDYTYFQH

SEQ ID NO: 599 - protein, 11 aa, synthetic construct
  REGION 1..11: note = Synthetic peptide
RASQSISTYLN

SEQ ID NO: 600 - protein, 7 aa, synthetic construct
  REGION 1..7: note = Synthetic peptide
GASSLQS

SEQ ID NO: 601 - protein, 9 aa, synthetic construct
  REGION 1..9: note = Synthetic peptide
QQSYSDPYT

SEQ ID NO: 602 - protein, 5 aa, synthetic construct
  REGION 1..5: note = Synthetic peptide
LYRMF

SEQ ID NO: 603 - protein, 17 aa, synthetic construct
  REGION 1..17: note = Synthetic peptide
SIWSSGGPTMYADSVKG

SEQ ID NO: 604 - protein, 10 aa, synthetic construct
  REGION 1..10: note = Synthetic peptide
EYPSTYYFDY

SEQ ID NO: 605 - protein, 11 aa, synthetic construct
  REGION 1..11: note = Synthetic peptide
RASQRISYYLT

SEQ ID NO: 606 - protein, 7 aa, synthetic construct
  REGION 1..7: note = Synthetic peptide
AASSLES

SEQ ID NO: 607 - protein, 9 aa, synthetic construct
  REGION 1..9: note = Synthetic peptide
QQAFSTPFT

SEQ ID NO: 608 - protein, 5 aa, synthetic construct
  REGION 1..5: note = Synthetic peptide
AYYMV

SEQ ID NO: 609 - protein, 17 aa, synthetic construct
  REGION 1..17: note = Synthetic peptide
YISPSGGQTQYADSVKG

SEQ ID NO: 610 - protein, 10 aa, synthetic construct
  REGION 1..10: note = Synthetic peptide
EAISSSSFDY

SEQ ID NO: 611 - protein, 11 aa, synthetic construct
  REGION 1..11: note = Synthetic peptide
RTRQSISNYLN

SEQ ID NO: 612 - protein, 7 aa, synthetic construct
  REGION 1..7: note = Synthetic peptide
AASSLQS

SEQ ID NO: 613 - protein, 9 aa, synthetic construct
  REGION 1..9: note = Synthetic peptide
QQSYDIPFT

SEQ ID NO: 614 - protein, 5 aa, synthetic construct
  REGION 1..5: note = Synthetic peptide
EYDMA

SEQ ID NO: 615 - protein, 17 aa, synthetic construct
  REGION 1..17: note = Synthetic peptide
YIVSSGGFTSYADSVKG

SEQ ID NO: 616 - protein, 10 aa, synthetic construct
  REGION 1..10: note = Synthetic peptide
WAGWIAAADY

SEQ ID NO: 617 - protein, 11 aa, synthetic construct
  REGION 1..11: note = Synthetic peptide
RASQSISNYLN

SEQ ID NO: 618 - protein, 7 aa, synthetic construct
  REGION 1..7: note = Synthetic peptide
AASSLQS

SEQ ID NO: 619 - protein, 9 aa, synthetic construct
  REGION 1..9: note = Synthetic peptide
QQSYSTPQT

SEQ ID NO: 620 - protein, 5 aa, synthetic construct
  REGION 1..5: note = Synthetic peptide
AYQMA

SEQ ID NO: 621 - protein, 17 aa, synthetic construct
  REGION 1..17: note = Synthetic peptide
VIYSSGGYTDYADSVKG

SEQ ID NO: 622 - protein, 10 aa, synthetic construct
  REGION 1..10: note = Synthetic peptide
HNWNDGAFDI

SEQ ID NO: 623 - protein, 11 aa, synthetic construct
  REGION 1..11: note = Synthetic peptide
RASQSISSYLN

SEQ ID NO: 624 - protein, 7 aa, synthetic construct
  REGION 1..7: note = Synthetic peptide
AASSLQS

SEQ ID NO: 625 - protein, 8 aa, synthetic construct
  REGION 1..8: note = Synthetic peptide
QQSYSTLT

SEQ ID NO: 626 - protein, 5 aa, synthetic construct
  REGION 1..5: note = Synthetic peptide
WYAMH

SEQ ID NO: 627 - protein, 17 aa, synthetic construct
  REGION 1..17: note = Synthetic peptide
GIYSSGGYTKYADSVKG

SEQ ID NO: 628 - protein, 11 aa, synthetic construct
  REGION 1..11: note = Synthetic peptide
DLSNGDDVFDI

SEQ ID NO: 629 - protein, 11 aa, synthetic construct
  REGION 1..11: note = Synthetic peptide
RASQSINFYLN

SEQ ID NO: 630 - protein, 7 aa, synthetic construct
  REGION 1..7: note = Synthetic peptide
VASSLES

SEQ ID NO: 631 - protein, 9 aa, synthetic construct
  REGION 1..9: note = Synthetic peptide
LQSYSAPYT

SEQ ID NO: 632 - protein, 5 aa, synthetic construct
  REGION 1..5: note = Synthetic peptide
YYQMG

SEQ ID NO: 633 - protein, 17 aa, synthetic construct
  REGION 1..17: note = Synthetic peptide
SIYPSGGMTDYADSVKG

SEQ ID NO: 634 - protein, 11 aa, synthetic construct
  REGION 1..11: note = Synthetic peptide
GSPWGDDAFDI

SEQ ID NO: 635 - protein, 11 aa, synthetic construct
  REGION 1..11: note = Synthetic peptide
RTSRRIGTYLN

SEQ ID NO: 636 - protein, 7 aa, synthetic construct
  REGION 1..7: note = Synthetic peptide
GASSLQS

SEQ ID NO: 637 - protein, 9 aa, synthetic construct
  REGION 1..9: note = Synthetic peptide
QQSFSSPWT

SEQ ID NO: 638 - protein, 5 aa, synthetic construct
  REGION 1..5: note = Synthetic peptide
WYPMQ

SEQ ID NO: 639 - protein, 17 aa, synthetic construct
  REGION 1..17: note = Synthetic peptide
YIYPSGGGTDYADSVKG

SEQ ID NO: 640 - protein, 11 aa, synthetic construct
  REGION 1..11: note = Synthetic peptide
SSGWLGDAFDI

SEQ ID NO: 641 - protein, 11 aa, synthetic construct
  REGION 1..11: note = Synthetic peptide
RASQSIATYLN

SEQ ID NO: 642 - protein, 7 aa, synthetic construct
  REGION 1..7: note = Synthetic peptide
AASSLQS

SEQ ID NO: 643 - protein, 9 aa, synthetic construct
  REGION 1..9: note = Synthetic peptide
QQSYSTRET

SEQ ID NO: 644 - protein, 5 aa, synthetic construct
  REGION 1..5: note = Synthetic peptide
WYTMH

SEQ ID NO: 645 - protein, 17 aa, synthetic construct
  REGION 1..17: note = Synthetic peptide
VIYPSGGPTSYADSVKG

SEQ ID NO: 646 - protein, 11 aa, synthetic construct
  REGION 1..11: note = Synthetic peptide
DGSGSYLGFDY

SEQ ID NO: 647 - protein, 11 aa, synthetic construct
  REGION 1..11: note = Synthetic peptide
RASQSISSYLN

SEQ ID NO: 648 - protein, 7 aa, synthetic construct
  REGION 1..7: note = Synthetic peptide
AASSLQS

SEQ ID NO: 649 - protein, 9 aa, synthetic construct
  REGION 1..9: note = Synthetic peptide
QQTYTTPWT

SEQ ID NO: 650 - protein, 5 aa, synthetic construct
  REGION 1..5: note = Synthetic peptide
SYPMG

SEQ ID NO: 651 - protein, 17 aa, synthetic construct
  REGION 1..17: note = Synthetic peptide
RISSSGGMTIYADSVKG

SEQ ID NO: 652 - protein, 9 aa, synthetic construct
  REGION 1..9: note = Synthetic peptide
DDWNVGMDV

SEQ ID NO: 653 - protein, 11 aa, synthetic construct
  REGION 1..11: note = Synthetic peptide
RASQDISNWLA

SEQ ID NO: 654 - protein, 7 aa, synthetic construct
  REGION 1..7: note = Synthetic peptide
AASSLQT

SEQ ID NO: 655 - protein, 9 aa, synthetic construct
  REGION 1..9: note = Synthetic peptide
QQSYSLPWT

SEQ ID NO: 656 - protein, 5 aa, synthetic construct
  REGION 1..5: note = Synthetic peptide
LYDMT

SEQ ID NO: 657 - protein, 17 aa, synthetic construct
  REGION 1..17: note = Synthetic peptide
GISSSGGVTIYADSVKG

SEQ ID NO: 658 - protein, 15 aa, synthetic construct
  REGION 1..15: note = Synthetic peptide
TYYYDSSGYADAFDI

SEQ ID NO: 659 - protein, 11 aa, synthetic construct
  REGION 1..11: note = Synthetic peptide
RASQSINTYLN

SEQ ID NO: 660 - protein, 7 aa, synthetic construct
  REGION 1..7: note = Synthetic peptide
AASTLES

SEQ ID NO: 661 - protein, 9 aa, synthetic construct
  REGION 1..9: note = Synthetic peptide
QQSYSTPPT

SEQ ID NO: 662 - protein, 5 aa, synthetic construct
  REGION 1..5: note = Synthetic peptide
VYLMH

SEQ ID NO: 663 - protein, 17 aa, synthetic construct
  REGION 1..17: note = Synthetic peptide
GISPSGGYTQYADSVKG

SEQ ID NO: 664 - protein, 9 aa, synthetic construct
  REGION 1..9: note = Synthetic peptide
PGGLDAFDI

SEQ ID NO: 665 - protein, 11 aa, synthetic construct
  REGION 1..11: note = Synthetic peptide
RASQSISSYLN

SEQ ID NO: 666 - protein, 7 aa, synthetic construct
  REGION 1..7: note = Synthetic peptide
AASSLQS

SEQ ID NO: 667 - protein, 9 aa, synthetic construct
  REGION 1..9: note = Synthetic peptide
QQSYSTPLT

SEQ ID NO: 668 - protein, 5 aa, synthetic construct
  REGION 1..5: note = Synthetic peptide
RYIMW

SEQ ID NO: 669 - protein, 17 aa, synthetic construct
  REGION 1..17: note = Synthetic peptide
GIYSSGGYTQYADSVKG

SEQ ID NO: 670 - protein, 10 aa, synthetic construct
  REGION 1..10: note = Synthetic peptide
ELEGLGGFDY

SEQ ID NO: 671 - protein, 11 aa, synthetic construct
  REGION 1..11: note = Synthetic peptide
RASQGISSWLA

SEQ ID NO: 672 - protein, 7 aa, synthetic construct
  REGION 1..7: note = Synthetic peptide
ATSGLQS

SEQ ID NO: 673 - protein, 9 aa, synthetic construct
  REGION 1..9: note = Synthetic peptide
QQAKSFPLT

SEQ ID NO: 674 - protein, 5 aa, synthetic construct
  REGION 1..5: note = Synthetic peptide
DYTMY

SEQ ID NO: 675 - protein, 17 aa, synthetic construct
  REGION 1..17: note = Synthetic peptide
SIVPSGGHTLYADSVKG

SEQ ID NO: 676 - protein, 13 aa, synthetic construct
  REGION 1..13: note = Synthetic peptide
DHLSSWYGGFFDY

SEQ ID NO: 677 - protein, 11 aa, synthetic construct
  REGION 1..11: note = Synthetic peptide
RASQSISSYLN

SEQ ID NO: 678 - protein, 7 aa, synthetic construct
  REGION 1..7: note = Synthetic peptide
AASSLQS

SEQ ID NO: 679 - protein, 9 aa, synthetic construct
  REGION 1..9: note = Synthetic peptide
QQSYSTRYT

SEQ ID NO: 680 - protein, 5 aa, synthetic construct
  REGION 1..5: note = Synthetic peptide
GYDMM

SEQ ID NO: 681 - protein, 17 aa, synthetic construct
  REGION 1..17: note = Synthetic peptide
VISSSGGNTAYADSVKG

SEQ ID NO: 682 - protein, 10 aa, synthetic construct
  REGION 1..10: note = Synthetic peptide
ESSGLYYFDY

SEQ ID NO: 683 - protein, 11 aa, synthetic construct
  REGION 1..11: note = Synthetic peptide
RASQSITIYLN

SEQ ID NO: 684 - protein, 7 aa, synthetic construct
  REGION 1..7: note = Synthetic peptide
GASNLHS

SEQ ID NO: 685 - protein, 9 aa, synthetic construct
  REGION 1..9: note = Synthetic peptide
QQSYDTPLT

SEQ ID NO: 686 - protein, 5 aa, synthetic construct
  REGION 1..5: note = Synthetic peptide
WYPMY

SEQ ID NO: 687 - protein, 17 aa, synthetic construct
  REGION 1..17: note = Synthetic peptide
SIGSSGGPTPYADSVKG

SEQ ID NO: 688 - protein, 10 aa, synthetic construct
  REGION 1..10: note = Synthetic peptide
WADYGGSLDY

SEQ ID NO: 689 - protein, 13 aa, synthetic construct
  REGION 1..13: note = Synthetic peptide
SGSSSNIGNNAVS

SEQ ID NO: 690 - protein, 7 aa, synthetic construct
  REGION 1..7: note = Synthetic peptide
YDDLLPS

SEQ ID NO: 691 - protein, 11 aa, synthetic construct
  REGION 1..11: note = Synthetic peptide
AAWDDSLNGFV

SEQ ID NO: 692 - protein, 5 aa, synthetic construct
  REGION 1..5: note = Synthetic peptide
RYPMM

SEQ ID NO: 693 - protein, 17 aa, synthetic construct
  REGION 1..17: note = Synthetic peptide
VIYPSGGDTFYADSVKG

SEQ ID NO: 694 - protein, 11 aa, synthetic construct
  REGION 1..11: note = Synthetic peptide
GDDYLWEAAVY

SEQ ID NO: 695 - protein, 11 aa, synthetic construct
  REGION 1..11: note = Synthetic peptide
RASQNIGNDVA

SEQ ID NO: 696 - protein, 7 aa, synthetic construct
  REGION 1..7: note = Synthetic peptide
HASTRAY

SEQ ID NO: 697 - protein, 10 aa, synthetic construct
  REGION 1..10: note = Synthetic peptide
QQFYDWPAHT

SEQ ID NO: 698 - protein, 5 aa, synthetic construct
  REGION 1..5: note = Synthetic peptide
YYHMW

SEQ ID NO: 699 - protein, 17 aa, synthetic construct
  REGION 1..17: note = Synthetic peptide
GISPSGGFTFYADSVKG

SEQ ID NO: 700 - protein, 14 aa, synthetic construct
  REGION 1..14: note = Synthetic peptide
DYYYDSSGYSPLGY

SEQ ID NO: 701 - protein, 11 aa, synthetic construct
  REGION 1..11: note = Synthetic peptide
RASQSISIYLN

SEQ ID NO: 702 - protein, 7 aa, synthetic construct
  REGION 1..7: note = Synthetic peptide
GASQLES

SEQ ID NO: 703 - protein, 9 aa, synthetic construct
  REGION 1..9: note = Synthetic peptide
QQSYNVPYT

SEQ ID NO: 704 - protein, 5 aa, synthetic construct
  REGION 1..5: note = Synthetic peptide
FYKMI

SEQ ID NO: 705 - protein, 17 aa, synthetic construct
  REGION 1..17: note = Synthetic peptide
SISSSGGSTQYADSVKG

SEQ ID NO: 706 - protein, 10 aa, synthetic construct
  REGION 1..10: note = Synthetic peptide
DRVDLGYLDY

SEQ ID NO: 707 - protein, 11 aa, synthetic construct
  REGION 1..11: note = Synthetic peptide
RTSQNINTYLN

SEQ ID NO: 708 - protein, 7 aa, synthetic construct
  REGION 1..7: note = Synthetic peptide
GVSSLHR

SEQ ID NO: 709 - protein, 9 aa, synthetic construct
  REGION 1..9: note = Synthetic peptide
QQSYSSPWT

SEQ ID NO: 710 - protein, 5 aa, synthetic construct
  REGION 1..5: note = Synthetic peptide
QYLMM

SEQ ID NO: 711 - protein, 17 aa, synthetic construct
  REGION 1..17: note = Synthetic peptide
SIYPSGGYTSYADSVKG

SEQ ID NO: 712 - protein, 10 aa, synthetic construct
  REGION 1..10: note = Synthetic peptide
VSTAVADNDY

SEQ ID NO: 713 - protein, 11 aa, synthetic construct
  REGION 1..11: note = Synthetic peptide
RASQTIDNYLH

SEQ ID NO: 714 - protein, 7 aa, synthetic construct
  REGION 1..7: note = Synthetic peptide
DASSLQS

SEQ ID NO: 715 - protein, 10 aa, synthetic construct
  REGION 1..10: note = Synthetic peptide
QQSYDTPQYT

SEQ ID NO: 716 - protein, 5 aa, synthetic construct
  REGION 1..5: note = Synthetic peptide
LYDMN

SEQ ID NO: 717 - protein, 17 aa, synthetic construct
  REGION 1..17: note = Synthetic peptide
GISPSGGQTMYADSVKG

SEQ ID NO: 718 - protein, 9 aa, synthetic construct
  REGION 1..9: note = Synthetic peptide
QPMISAFDI

SEQ ID NO: 719 - protein, 11 aa, synthetic construct
  REGION 1..11: note = Synthetic peptide
RASQSISSYLN

SEQ ID NO: 720 - protein, 7 aa, synthetic construct
  REGION 1..7: note = Synthetic peptide
AASSLQS

SEQ ID NO: 721 - protein, 10 aa, synthetic construct
  REGION 1..10: note = Synthetic peptide
QQSYSTPPWT

SEQ ID NO: 722 - protein, 5 aa, synthetic construct
  REGION 1..5: note = Synthetic peptide
LYAMW

SEQ ID NO: 723 - protein, 17 aa, synthetic construct
  REGION 1..17: note = Synthetic peptide
YISSSGGFTSYADSVKG

SEQ ID NO: 724 - protein, 10 aa, synthetic construct
  REGION 1..10: note = Synthetic peptide
YRVGVAATDY

SEQ ID NO: 725 - protein, 11 aa, synthetic construct
  REGION 1..11: note = Synthetic peptide
RASQSISTYLN

SEQ ID NO: 726 - protein, 7 aa, synthetic construct
  REGION 1..7: note = Synthetic peptide
AASSLQS

SEQ ID NO: 727 - protein, 9 aa, synthetic construct
  REGION 1..9: note = Synthetic peptide
QQSYSTPHT

SEQ ID NO: 728 - protein, 5 aa, synthetic construct
  REGION 1..5: note = Synthetic peptide
GYIMH

SEQ ID NO: 729 - protein, 17 aa, synthetic construct
  REGION 1..17: note = Synthetic peptide
WIYPSGGWTEYADSVKG

SEQ ID NO: 730 - protein, 10 aa, synthetic construct
  REGION 1..10: note = Synthetic peptide
DAPGVGAIDY

SEQ ID NO: 731 - protein, 11 aa, synthetic construct
  REGION 1..11: note = Synthetic peptide
RASQDISVYLN

SEQ ID NO: 732 - protein, 7 aa, synthetic construct
  REGION 1..7: note = Synthetic peptide
GGASLQS

SEQ ID NO: 733 - protein, 9 aa, synthetic construct
  REGION 1..9: note = Synthetic peptide
QQSYSLPFT

SEQ ID NO: 734 - protein, 5 aa, synthetic construct
  REGION 1..5: note = Synthetic peptide
MYWMQ

SEQ ID NO: 735 - protein, 17 aa, synthetic construct
  REGION 1..17: note = Synthetic peptide
YIYPSGGPTKYADSVKG

SEQ ID NO: 736 - protein, 11 aa, synthetic construct
  REGION 1..11: note = Synthetic peptide
PSGSYGDAFDI

SEQ ID NO: 737 - protein, 11 aa, synthetic construct
  REGION 1..11: note = Synthetic peptide
RASQNISSYLN

SEQ ID NO: 738 - protein, 7 aa, synthetic construct
  REGION 1..7: note = Synthetic peptide
AASSLQS

SEQ ID NO: 739 - protein, 9 aa, synthetic construct
  REGION 1..9: note = Synthetic peptide
QQSYSTPRT

SEQ ID NO: 740 - protein, 5 aa, synthetic construct
  REGION 1..5: note = Synthetic peptide
LYIMG

SEQ ID NO: 741 - protein, 17 aa, synthetic construct
  REGION 1..17: note = Synthetic peptide
GIYPSGGFTMYADSVKG

SEQ ID NO: 742 - protein, 10 aa, synthetic construct
  REGION 1..10: note = Synthetic peptide
ESSGVAAPDY

SEQ ID NO: 743 - protein, 16 aa, synthetic construct
  REGION 1..16: note = Synthetic peptide
RSSQSLLHSRGYNYLD

SEQ ID NO: 744 - protein, 7 aa, synthetic construct
  REGION 1..7: note = Synthetic peptide
LGSNRAS

SEQ ID NO: 745 - protein, 8 aa, synthetic construct
  REGION 1..8: note = Synthetic peptide
MQALQRRT

SEQ ID NO: 746 - protein, 5 aa, synthetic construct
  REGION 1..5: note = Synthetic peptide
YYTMI

SEQ ID NO: 747 - protein, 17 aa, synthetic construct
  REGION 1..17: note = Synthetic peptide
GIRSSGGGTRYADSVKG

SEQ ID NO: 748 - protein, 18 aa, synthetic construct
  REGION 1..18: note = Synthetic peptide
DGSRYSYGSIYYYYGMDA

SEQ ID NO: 749 - protein, 109 aa, synthetic construct
  REGION 1..109: note = Synthetic polypeptide
QDIQMTQSPSSLSASVGDSVTISCRASQSISMYLNWYQHKPGKAPKLLIYGTSSLQSGVPSRFSGSGPGGTDFTLTISSLQPEDFATYYCQQSYSAPWTFGQGTKVEIK

SEQ ID NO: 750 - protein, 136 aa, synthetic construct
  REGION 1..136: note = Synthetic polypeptide
EVQLLESGGGLVQPGGSLRLSCAASGFTFSLYQMTWVRQAPGKGLEWVSGIWPSGGFTDYADSVKGRFTISRDNSKNTLYLQMNSLRAEDTAVYYCARVSTAVADNDYWGQGTLVTVSSASTKGPSVFPLAPSSKS

SEQ ID NO: 751 - protein, 108 aa, synthetic construct
  REGION 1..108: note = Synthetic polypeptide
QDIQMTQSPSSLSASVGDRVTITCRASQRISFYLNWFQQKPGKAPNLLIYGASSLQSGVPSRFSGSGSGTDFTLTISSLQPKDFGTYYCQQTFSTPNTFGQGTKLEIK

SEQ ID NO: 752 - protein, 138 aa, synthetic construct
  REGION 1..138: note = Synthetic polypeptide
EVQLLESGGGLVQPGGSLRLSCAASGFTFSPYPMQWVRQAPGKGLEWVSSISSSGGMTEYADSVKGRFTISRDNSKNTLYLQMNSLRAEDTAVYYCARDDYGGKGGAFDIWGQGTMVTVSSASTKGPSVFPLAPSSKS

SEQ ID NO: 753 - protein, 108 aa, synthetic construct
  REGION 1..108: note = Synthetic polypeptide
QDIQMTQSPSSLSASVGDRVTITCRASQSISSYLNWYQQKPGKAPKLLIYAASSLQSGVPSRFSGSGSGTDFTLTISSLQPEDFATYYCQQSYSTLWTFGQGTKVEIK

SEQ ID NO: 754 - protein, 136 aa, synthetic construct
  REGION 1..136: note = Synthetic polypeptide
EVQLLESGGGLVQPGGSLRLSCAASGFTFSKYFMGWVRQAPGKGLEWVSVIGSSGGWTSYADSVKGRFTISRDNSKNTLYLQMNSLRAEDTAVYYCARVSTAVADNDYWGQGTLVTVSSASTKGPSVFPLAPSSKS

SEQ ID NO: 755 - protein, 107 aa, synthetic construct
  REGION 1..107: note = Synthetic polypeptide
QDIQMTQSPSSLSASVGDRVTITCRASQSISSYLNWYQQKPGKAPKLLIYGASSLQSGVPSRFSGSGSGTDFTLTISSLQPEDSATYYCQQSYTRWTFGQGTKVEIK

SEQ ID NO: 756 - protein, 137 aa, synthetic construct
  REGION 1..137: note = Synthetic polypeptide
EVQLLESGGGLVQPGGSLRLSCAASGFTFSRYHMVWVRQAPGKGLEWVSSISPSGGWTNYADSVKGRFTISRDNSKNTLYLQMNSLRAEDTAMYYCAREMATIAGQFDPWGQGTLVTVSSASTKGPSVFPLAPSSKS

SEQ ID NO: 757 - protein, 108 aa, synthetic construct
  REGION 1..108: note = Synthetic polypeptide
QDIQMTQSPSSLSASVGDRVTITCRASQSISTYLNWYQLKPGKAPKLLIYNAFSMERGVPSTISGSGSGTDFTLTISSLQPEDFATYYCQQSYTTPTTFGQGTKVEIK

SEQ ID NO: 758 - protein, 137 aa, synthetic construct
  REGION 1..137: note = Synthetic polypeptide
EVQLLESGGGLVQPGGSLRLSCAASGFTFSRYRMVWVRQAPGKGLEWVSSIYPSGGMTAYADSVKGRFTISRDNSKNTLYLQMNSLRAEDTAVYYCARDAVGIGDAFDIWGQGTMVTVSSASTKGPSVFPLAPSSKS

SEQ ID NO: 759 - protein, 105 aa, synthetic construct
  REGION 1..105: note = Synthetic polypeptide
QSALTQPPSVSVSPGQTASITCSGDKLGDKYTSWHQQKPGQSPVLVIYQDSKRPSGIPERFSGSNSGNTATLTISGTQAMDEADYYCQAWDSSTVFGGGTRLTVL

SEQ ID NO: 760 - protein, 138 aa, synthetic construct
  REGION 1..138: note = Synthetic polypeptide
EVQLLESGGGLVQPGGSLRLSCAASGFTFSYYPMQWVRQAPGKGLEWVSYIYPSGGLTSYADSVKGRFTISRDNSKNTLYLQMNSLRAEDTAVYYCARLFYGSGSVGFEYWGQGTLVTVSSASTKGPSVFPLAPSSKS

SEQ ID NO: 761 - protein, 108 aa, synthetic construct
  REGION 1..108: note = Synthetic polypeptide
QDIQMTQSPSFVSASVGDRVTITCRASQDISSWLVWYQQKPGKGPKLLIYDASNLQSGVPSRFSGGGSGTHFTLTISSLQPEDFATYYCQQADGFPLTFGGGTKVEMK

SEQ ID NO: 762 - protein, 135 aa, synthetic construct
  REGION 1..135: note = Synthetic polypeptide
EVQLLESGGGLVQPGGSLRLSCAASGFTFSLYNMNWVRQAPGKGLEWVSSISPSGGFTDYADSVKGRFTISRDNSKNTLYLQMNSLRAEDTAVYYCARDLDLGILDYWGQGTLVTVSSASTKGPSVFPLAPSSKS

SEQ ID NO: 763 - protein, 109 aa, synthetic construct
  REGION 1..109: note = Synthetic polypeptide
QDIQMTQSPSSLSASVGDRVTITCRASQSISSYLNWYQQKPGKAPKLLIYAASSLQSGVPSRFSGSGSGTDFTLTISSLQPEDFATYYCQQSYSTLMYTFGQGTKLEIK

SEQ ID NO: 764 - protein, 136 aa, synthetic construct
  REGION 1..136: note = Synthetic polypeptide
EVQLLESGGGLVQPGGSLRLSCAASGFTFSHYFMTWVRQAPGKGLEWVSSIVPSGGMTQYADSVKGRFTISRDNSKNTLYLQMNSLRAEDTAVYYCARDSYSSSWFDIWGQGTMVTVSSASTKGPSVFPLAPSSKS

SEQ ID NO: 765 - protein, 108 aa, synthetic construct
  REGION 1..108: note = Synthetic polypeptide
QDIQMTQSPSSLSASVGDTVTITCRASQGVSYYLAWFQQKPGKAPKSLIYGASSLQSGVPSKFSGSGSGTVFTLTISSLQPDDFATYYCQQYNTYPPTFGQGTRLDIK

SEQ ID NO: 766 - protein, 136 aa, synthetic construct
  REGION 1..136: note = Synthetic polypeptide
EVQLLESGGGLVQPGGSLRLSCAASGFTFSLYEMLWVRQAPGKGLEWVSVIYPSGGYTDYADSVKGRFTISRDNSKNTLYLQMNSLRAEDMAVYYCARSFSGFGEIDYWGQGTLVTVSSASTKGPSVFPLAPSSKS

SEQ ID NO: 767 - protein, 108 aa, synthetic construct
  REGION 1..108: note = Synthetic polypeptide
QDIQMTQSPSSLSASIGDRVTITCRASQYISTYLNWYEQKPGKAPKLLIYGTSSLQSGVPSRFSGSGSGTEFSLTISSLQPEDFATYYCQQSFTTPFTFGQGTKLEIK

SEQ ID NO: 768 - protein, 138 aa, synthetic construct
  REGION 1..138: note = Synthetic polypeptide
EVQLLESGGGLVQPGGSLRLSCAASGFTFSGYWMGWVRQAPGKGLEWVSSISSSGGWTQYADSVKGRFTISRDNSKNTLYLQMNSLRAEDTATYYCARDDEIAAGGAFDIWGQGAMVTVSSASTKGPSVFPLAPSSKS

SEQ ID NO: 769 - protein, 107 aa, synthetic construct
  REGION 1..107: note = Synthetic polypeptide
QDIQMTQSPSSLSASLGDRVTITCRASQNIDIYLNWYQQTPGKAPKLLIYGAYNLQSGVPSRFSGSGSGTDFTLTISSLQPEDFGTYYCQQSYGTPVFGQGTKLEIK

SEQ ID NO: 770 - protein, 136 aa, synthetic construct
  REGION 1..136: note = Synthetic polypeptide
EVQLLESGGGLVQPGGSLRLSCAASGFTFSGYFMMWVRQAPGKGLEWVSSIYSSGGYTDYADSVKGRFTISRDNSKNTLYLQMNSLRAEDTAVYYCAREVAGTYAFDIWGQGTMVTVSSASTKGPSVFPLAPSSKS

SEQ ID NO: 771 - protein, 108 aa, synthetic construct
  REGION 1..108: note = Synthetic polypeptide
QDIQMTQSPSSLSASVGDRVTVTCRASQRISTYLNWYQQKPGKAPKLLISGASSLQSGVPSRFSGSGSGTDFTLTISSLQPDDFATYYCQQSYNTPRTFGQGTKVEIR

SEQ ID NO: 772 - protein, 137 aa, synthetic construct
  REGION 1..137: note = Synthetic polypeptide
EVQLLESGGGLVQPGGSLRLSCAASGFTFSAYEMWWVRQAPGKGLEWVSYIGSSGGSTSYADSVKGRFTISRDNSKNTLYLQMNSLRAEDTAVYYCTGGNSSSFDAFDIWGQGTMVTVSSASTKGPSVFPLAPSSKS

SEQ ID NO: 773 - protein, 108 aa, synthetic construct
  REGION 1..108: note = Synthetic polypeptide
QDIQMTQSPSSLSASVGDRVTITCRASQSISIYVNWYQQKPGKAPNLLIFAASSLQRGVPSRFSGSGSGADFTLTISSLQPEDFATYYCQQSFSTPLTFGGGTKVEIK

SEQ ID NO: 774 - protein, 136 aa, synthetic construct
  REGION 1..136: note = Synthetic polypeptide
EVQLLESGGGLVQPGGSLRLSCAASGFTFSHYGMVWVRQAPGKGLEWVSYIVPSGGLTYYADSVKGRFTISRDNSKNTLYLQMNSLRAEDTAVYYCARVDYTGDGLGYWGQGTLVTVSSASTKGPSVFPLAPSSKS

SEQ ID NO: 775 - protein, 108 aa, synthetic construct
  REGION 1..108: note = Synthetic polypeptide
QDIQMTQSPSSLSASVGDRVTITCRASQGISSYLNWYQQKPGNAPNLLIYGASSLQSGVPSRFSGSGSGTDFTLTISSLQPEDFATYYCQESYSTLFTFGPGTTVEIK

SEQ ID NO: 776 - protein, 137 aa, synthetic construct
  REGION 1..137: note = Synthetic polypeptide
EVQLLESGGGLVQPGGSLRLSCAASGFTFSLYPMQWVRQAPGKGLEWVSSIGSSGGMTFYADSVKGRFTISRDNSKNTLYLQMNSLRAEDTAVYYCTREVGAAGFAFDIWGQGTMVTVSSASTKGPSVFPLAPSSKS

SEQ ID NO: 777 - protein, 108 aa, synthetic construct
  REGION 1..108: note = Synthetic polypeptide
QDIQMTQSPSSLSASVGDRVTLTCRASRTISFYLNWYQQKAGKAPELLIYGGSSLHSGVPSRFSGSGSGTDFSLTISNLQPEDIAVYYCQQSFSSPWTFGQGTKVEIK

SEQ ID NO: 778 - protein, 137 aa, synthetic construct
  REGION 1..137: note = Synthetic polypeptide
EVQLLESGGGLVQPGGSLRLSCAASGFTFSWYKMMWVRQAPGKGLEWVSSIYPSGGWTNYADSVKGRFTISRDNSKNTLYLQMNSLRAEDTAVYYCTRGSPWGDDAFDIWGQGTMVTVSSASTKGPSVFPLAPSSKS

SEQ ID NO: 779 - protein, 108 aa, synthetic construct
  REGION 1..108: note = Synthetic polypeptide
QDIQMIQSPSSLSASVGDRVTITCRASQSISGYLNWYQQRSGKAPKLLIFAASNLQTGVPSRFSGSGSGTDFTLTINNLQPEDFATYYCQQSHTPPKTFGPGTKVDIK

SEQ ID NO: 780 - protein, 136 aa, synthetic construct
  REGION 1..136: note = Synthetic polypeptide
EVQLLESGGGLVQPGGSLRLSCAASGFTFSEYDMMWVRQAPGKGLEWVSSIGSSGGMTYYADSVKGRFTISRDNSKNTLYLQMNSLRAEDTAVYYCARDQVAAAAIDYWGQGTLVTVSSASTKGPSVFPLAPSSKS

SEQ ID NO: 781 - protein, 109 aa, synthetic construct
  REGION 1..109: note = Synthetic polypeptide
QDIQMTQSPSSLSASVGDRVTITCRASQSISSYLNWYQQKPGKAPKLLIYAASSLQSGVPSRFSGSGSGTDFTLTISSLQPEDFATYYCQQSYSTPPYTFGQGTKLEIK

SEQ ID NO: 782 - protein, 137 aa, synthetic construct
  REGION 1..137: note = Synthetic polypeptide
EVQLLESGGGLVQPGGSLRLSCAASGFTFSPYAMTWVRQAPGKGLEWVSVIYPSGGFTDYADSVKGRFTISRDNSKNTLYLQMNSLRAEDTAMYYCARASGSYLDAFDIWGQGTMVTVSSASTKGPSVFPLAPSSKS

SEQ ID NO: 783 - protein, 108 aa, synthetic construct
  REGION 1..108: note = Synthetic polypeptide
QDIQMTQSPSSLSASVGDRVTITCRASQSISSYLNWYQQKPGKAPKLLIYAASSLQSGVPSKFSGSGSGTDYTLTISSLQPEDFATYYCQQTYTTPWTFGQGTKVEIK

SEQ ID NO: 784 - protein, 135 aa, synthetic construct
  REGION 1..135: note = Synthetic polypeptide
EVQLLESGGGLVQPGGSLRLSCAASGFTFSSYPMGWVRQAPGKGLEWVSRISSSGGMTIYADSVKGRFTISRDNSKNTLYLQMNSLRAEDTAVYYCARDDWNVGMDVWGQGTTVTVSSASTKGPSVFPLAPSSKS

SEQ ID NO: 785 - protein, 108 aa, synthetic construct
  REGION 1..108: note = Synthetic polypeptide
QDIQMTQSPSSLSASVGDRVTITCRASQSINTYLNWYQQKPGKAPKVLIHAASTLESGVPSRFSGSGSGTDFTLTISSLQPEDFATYYCQQSYSTPYTFGQGTKLEVR

SEQ ID NO: 786 - protein, 135 aa, synthetic construct
  REGION 1..135: note = Synthetic polypeptide
EVQLLESGGGLVQPGGSLRLSCAASGFTFSDYDMEWVRQAPGKGLEWVSSISPSGGSTIYADSVKGRFTISRDNSKNTLYLQMNSLRAEDTAVYYCARQGLLTAFDIWGQGTMVTVSSASTKGPSVFPLAPSSKS

SEQ ID NO: 787 - protein, 108 aa, synthetic construct
  REGION 1..108: note = Synthetic polypeptide
QDIQMTQSPSSLSASVGDRVTITCRASQSISSYLNWYQQKPGKAPKLLIYAASSLQSGVPSRFSGSGSGTDFTLTISSLQPEDFATYYCQQSYSTPITFGGGTKVEIK

SEQ ID NO: 788 - protein, 136 aa, synthetic construct
  REGION 1..136: note = Synthetic polypeptide
EVQLLESGGGLVQPGGSLRLSCAASGFTFSYYTMLWVRQAPGKGLEWVSSIYPSGGFTMYADSVKGRFTISRDNSKNTLYLQMNSLRAEDTAVYYCARVDTAMAMIDYWGQGTLVTVSSASTKGPSVFPLAPSSKS

SEQ ID NO: 789 - protein, 108 aa, synthetic construct
  REGION 1..108: note = Synthetic polypeptide
QDIQMTQSPSSLSASVGDRVIITCRASRSIATYLNWYQQKPGKAPNLLIFGASTLQSGVPSRFSGSGSGTDFTLTISDLQPEDFATYYCQQSFSDPYTFGQGTNLEMK

SEQ ID NO: 790 - protein, 137 aa, synthetic construct
  REGION 1..137: note = Synthetic polypeptide
EVQLLESGGGLVQPGGSLRLSCAASGFTFSAYMMIWVRQAPGKGLEWVSVIYPSGGVTMYADSVKGRFTISRDNSKNTLYLQMNSLRAEDTAVYYCARGTVGASDAFDIWGQGTMVTVSSASTKGPSVFPLAPSSKS

SEQ ID NO: 791 - protein, 106 aa, synthetic construct
  REGION 1..106: note = Synthetic polypeptide
QYELTQAPSVSVAPGQTASITCSGDKLGNRYTSWYQQKPGQSPVLVIFQDNKRPSGIPERFSGSNSGNTATLTISGTQAMDEADYYCQALDSNTYVFGTGTKVTVL

SEQ ID NO: 792 - protein, 139 aa, synthetic construct
  REGION 1..139: note = Synthetic polypeptide
EVQLLESGGGLVQPGGSLRLSCAASGFTFSWYSMGWVRQAPGKGLEWVSYIVPSGGYTMYADSVKGRFTISRDNSKNTLYLQMNSLRAEDTAVYYCARDPGVSYYYYGMDVWGQGTTVTVSSASTKGPSVFPLAPSSKS

SEQ ID NO: 793 - protein, 108 aa, synthetic construct
  REGION 1..108: note = Synthetic polypeptide
QDIQMTQSPSSLSASVGDRVTITCRASQSISSYLNWYQQKPGKAPKLLIYAASSLQSGVPSRFSGSGSGTDFTLTISSLQPEDFATYYCQQSYSTPPTFGQGTRLEIK

SEQ ID NO: 794 - protein, 137 aa, synthetic construct
  REGION 1..137: note = Synthetic polypeptide
EVQLLESGGGLVQPGGSLRLSCAASGFTFSAYTMWWVRQAPGKGLEWVSSIWPSGGSTFYADSVKGRFTISRDNSKNTLYLQMNSLRAEDTAVYYCARTYDSSAGEVDYWGQGTLVTVSSASTKGPSVFPLAPSSKS

SEQ ID NO: 795 - protein, 108 aa, synthetic construct; identical to SEQ ID NO: 751
  REGION 1..108: note = Synthetic polypeptide

SEQ ID NO: 796 - protein, 138 aa, synthetic construct; identical to SEQ ID NO: 752
  REGION 1..138: note = Synthetic polypeptide

SEQ ID NO: 797 - protein, 108 aa, synthetic construct
  REGION 1..108: note = Synthetic polypeptide
QDIQMTQSPLSLSAFVGDRVTITCRASRDISVYLNWYQLKSGKAPKLLIYGASSLQSGVPSRFSGSGSGTDFTLTITSLQPEDFATYYCQQSYSIPFTFGGGTKVETK

SEQ ID NO: 798 - protein, 134 aa, synthetic construct
  REGION 1..134: note = Synthetic polypeptide
EVQLLESGGGLVQPGGSLRLSCAASGFTFSLYLMHWVRQAPGKGLEWVSSIYSSGGFTTYADSVKGRFTISRDNSKNTLYLQMNSLRAEDTAVYYCARDTDYGMDVWGQGTTVTVSSASTKGPSVFPLAPSSKS

SEQ ID NO: 799 - protein, 108 aa, synthetic construct
  REGION 1..108: note = Synthetic polypeptide
QDIQMTQSPSSLSASVGDGVTITCRASQSISTYLNWYQQRPGKAPKLLIYGASSLQSGVPSRFSGSGSGTDFTLTISSLQREDFATYYCQQSFSTPWTFGQGTRVEIK

SEQ ID NO: 800 - protein, 136 aa, synthetic construct
  REGION 1..136: note = Synthetic polypeptide
EVQLLESGGGLVQPGGSLRLSCAASGFTFSWYEMSWVRQAPGKGLEWVSRIWPSGGVTMYADSVKGRFTISRDNSKNTLYLQMNSLRAEDTAVYYCTRTSITTVGMDVWGQGTTVTVSSASTKGPSVFPLAPSSKS

SEQ ID NO: 801 - protein, 108 aa, synthetic construct
  REGION 1..108: note = Synthetic polypeptide
QDIQMTQSPSSLSASVGDRVTITCRASQSISIYLNWYQQKPEKAPKLLIFAASTLQSGVPSRFSGSGSGTDFTLTISNLQPEDFATYYCQQSHSIPPTFGLGTKVEVK

SEQ ID NO: 802 - protein, 136 aa, synthetic construct
  REGION 1..136: note = Synthetic polypeptide
EVQLLESGGGLVQPGGSLRLSCAASGFTFSMYPMMWVRQAPGKGLEWVSYISPSGGMTDYADSVKGRFTISRDNSKNTLYLQMNSLRAEDMAVYYCARVAGSSDAFDIWGQGTMVTVSSASTKGPSVFPLAPSSKS

SEQ ID NO: 803 - protein, 113 aa, synthetic construct
  REGION 1..113: note = Synthetic polypeptide
QDIQMTQSPLSLPVTPGEPASISCRSSQSLLHSNGYNYLDWYLQKPGQSPQLLIYLGSNRASGVPDRFSGSGSGTDFTLKISRVEAEDVGVYYCMQALQTPLTFGPGTKVHIK

SEQ ID NO: 804 - protein, 131 aa, synthetic construct
  REGION 1..131: note = Synthetic polypeptide
EVQLLESGGGLVQPGGSLRLSCAASGFTFSAYPMNWVRQAPGKGLEWVSRISSSGGNTSYADSVKGRFTISRDNSKNTLYLQMNSLRAEDTAVYYCALGYLGYWGQGTLVTVSSASTKGPSVFPLAPSSKS

SEQ ID NO: 805 - protein, 108 aa, synthetic construct
  REGION 1..108: note = Synthetic polypeptide
QDIQMTQSPSSLSASVGDRVTITCRASQSISTYLNWYQQKPGKAPKLLIYGASSLQSGVPSRFSGSGSGTDFTLTISSLQPEDFTIYYCQQSYSDPYTFGQGTKLDIK

SEQ ID NO: 806 - protein, 136 aa, synthetic construct
  REGION 1..136: note = Synthetic polypeptide
EVQLLESGGGLVQPGGSLRLSCAASGFTFSLYRMFWVRQAPGKGLEWVSSIWSSGGPTMYADSVKGRFTISRDNSKNTLYLQMNSLRAEDTAVYYCAREYPSTYYFDYWGQGTLVTVSSASTKGPSVFPLAPSSKS

SEQ ID NO: 807 - protein, 108 aa, synthetic construct
  REGION 1..108: note = Synthetic polypeptide
QDIQMTQSPSSLSASVGDRVTITCRASQTIDDDLIWYQQKPGRAPKLLIYAASSLQSGVPSRFSGSGSGTDFTLTITSLQPEDFATYYCQQSYNIPRTFGQGTKLESK

SEQ ID NO: 808 - protein, 141 aa, synthetic construct
  REGION 1..141: note = Synthetic polypeptide
EVQLLESGGGLVQPGGSLRLSCAASGFTFSNYDMMWVRQAPGKGLEWVSYISPSGGFTRYADSVKGRFTISRDNSKNTLYLQMNSLRAEDTATYYCAKDIYYYNWGPSHYFDSWGQGTLVTVSSASTKGPSVFPLAPSSKS

SEQ ID NO: 809 - protein, 108 aa, synthetic construct
  REGION 1..108: note = Synthetic polypeptide
QDIQMTQSPSSLSASVGDSVTITCRASQSISGYINWYQQKAGKAPKLLIYAASSLQSGVPSRFSGSGSGTHFTLTISSLQPEDFATYYCQQYVSYPFTFGPGTKVDIK

SEQ ID NO: 810 - protein, 138 aa, synthetic construct
  REGION 1..138: note = Synthetic polypeptide
EVQLLESGGGLVQPGGSLRLSCAASGFTFSQYGMQWVRQAPGKGLEWVSSIRSSGGATRYADSVKGRFTISRDNSKNTLYLQMNSLRAEDTAVYYCARDGYYDSSGYPDYWGQGTLVTVSSASTKGPSVFPLAPSSKS

SEQ ID NO: 811 - protein, 108 aa, synthetic construct
  REGION 1..108: note = Synthetic polypeptide
QDIQMTQSPSSLSASVGDRVAITCRASQSIDTYLNWYQQKPGKAPKLLIYDASNLEIGVPSRFSGSGSGTDFTFIINSLQPEDVATYYCQHYLYAPYSFGQGTKLEIK

SEQ ID NO: 812 - protein, 137 aa, synthetic construct
  REGION 1..137: note = Synthetic polypeptide
EVQLLESGGGLVQPGGSLRLSCAASGFTFSNYWMMWVRQAPGKGLEWVSGIGSSGGFTSYADSVKGRFTISRDNSKNTLYLQMNSLRAEDTAVYYCAKGSYSDYGVFESWGQGTLVTVSSASTKGPSVFPLAPSSKS

SEQ ID NO: 813 - protein, 108 aa, synthetic construct
  REGION 1..108: note = Synthetic polypeptide
QDIQMTQSPSSLSASVGDRVTITCRASQSISSYLNWYQQKPGKAPKLLIYAASSLQSGVPSRFSGSGSGTDFTLTISSLQPEDFATYYCQQSYSTPPTFGQGTKVEIK

SEQ ID NO: 814 - protein, 136 aa, synthetic construct
  REGION 1..136: note = Synthetic polypeptide
EVQLLESGGGLVQPGGSLRLSCAASGFTFSTYEMYWVRQAPGKGLEWVSGIGSSGGMTMYADSVKGRFTISRDNSKNTLYLQMNSLRAEDTAMYYCAREQPGIAALQFWGQGTLVTVSSASTKGPSVFPLAPSSKS

SEQ ID NO: 815 - protein, 108 aa, synthetic construct
  REGION 1..108: note = Synthetic polypeptide
QDIQMTQSPSSLSASVGDRVTITCRASQSISIYLTWYQHRPGKAPNLLIYGAATLQTGVPSRFSGSGSGTDFTLTIRGLQPEDFATYYCQQTFSLPRTFGQGTKLEIK

SEQ ID NO: 816 - protein, 138 aa, synthetic construct
  REGION 1..138: note = Synthetic polypeptide
EVQLLESGGGLVQPGGSLRLSCAASGFTFSMYHMNWVRQAPGKGLEWVSGIVSSGGVTFYADSVKGRFTISRDNSKNTLYLQMNSLRAEDTAVYYCARITTVTTGGAFDIWGQGTMVTVSSASTKGPSVFPLAPSSKS

SEQ ID NO: 817 - protein, 108 aa, synthetic construct
  REGION 1..108: note = Synthetic polypeptide
QDIQMTQSPSSLSASVGDTVTITCRTSQTINNYLNWYQQRPGEAPKVLIYATHTLESGVPSRFSGSGSGTDFTLTIGSLQPEDFATYYCQQSFAFPYTFGQGTKVEIT

SEQ ID NO: 818 - protein, 135 aa, synthetic construct
  REGION 1..135: note = Synthetic polypeptide
EVQLLESGGGLVQPGGSLRLSCAASGFTFSWYTMGWVRQAPGKGLEWVSWIYFGGLTTYADSVKGRFTISRDNSKNTLYLQMNSLRAEDTAVYYCARLGGPLDAFDIWGQGTMVTVSSASTKGPSVFPLAPSSKS

SEQ ID NO: 819 - protein, 108 aa, synthetic construct
  REGION 1..108: note = Synthetic polypeptide
QDIQMTQSPSSLSASIGDRVTISCRASRGIGTYLNWYQQHAGKAPKLLIRAASSLETGVPPRFSGSGSGTDFTLTISSLQSDDFATYYCQESFTNVYNFGQGTKLEIK

SEQ ID NO: 820 - protein, 137 aa, synthetic construct
  REGION 1..137: note = Synthetic polypeptide
EVQLLESGGGLVQPGGSLRLSCAASGFTFSQYAMHWVRQAPGKGLEWVSSIYPSGGFTLYADSVKGRFTISRDNSKNTLYLQMNSLRAEDTAMYYCARGGWLAGGELLNWGQGTLVTVSSASTKGPSVFPLAPSSKS

SEQ ID NO: 821 - protein, 108 aa, synthetic construct
  REGION 1..108: note = Synthetic polypeptide
QDIQMTQSPSSLSASVGDRVTITCRTSQGINHYLNWYQQKPGKAPKILVFAASELQTGVPSRFSGTGSGTSYTLTITSLQPEDVATYYCQQTYTSPYTFGQGTKLEVK

SEQ ID NO: 822 - protein, 138 aa, synthetic construct
  REGION 1..138: note = Synthetic polypeptide
EVQLLESGGGLVQPGGSLRLSCAASGFTFSLYNMTWVRQAPGKGLEWVSYIYPSGGGTHYADSVKGRFTISRDNSKNTLYLQMNSLRAEDTAVYYCARDTGFWSADAFDIWGQGTMVTVSSASTKGPSVFPLAPSSKS

SEQ ID NO: 823 - protein, 108 aa, synthetic construct
  REGION 1..108: note = Synthetic polypeptide
QDIQMTQSPSSLSAFVGDRVSITCRASQTISVYVNWYQHKSGQAPKLLIYGASSLQSGVPSRFSGSGSGTDFTLTISSLQPEDFATYFCQQSYSIPFTFGGGTDVQIR

SEQ ID NO: 824 - protein, 135 aa, synthetic construct
  REGION 1..135: note = Synthetic polypeptide
EVQLLESGGGLVQPGGSLRLSCAASGFTFSQYPMNWVRQAPGKGLEWVSSISSSGGFTTYADSVKGRFTISRDNSKNTLYLQMNSLRAEDTAVYYCAREEQQGGFDYWGQGTLVTVSSASTKGPSVFPLAPSSKS

SEQ ID NO: 825 - protein, 108 aa, synthetic construct
  REGION 1..108: note = Synthetic polypeptide
QDIQMTQSPSSLSASVGDRVTITCRASQSISRYLNWYQQKPGKAPKLLIYAASTLETGVPSRFSGSGSGTDFTLTITTLQPEDFVIYYCQQSYSTPYTFGQGTKLEIK

SEQ ID NO: 826 - protein, 137 aa, synthetic construct
  REGION 1..137: note = Synthetic polypeptide
EVQLLESGGGLVQPGGSLRLSCAASGFTFSWYYMGWVRQAPGKGLEWVSWIVSSGGLTLYADSVKGRFTISRDNSKNTLYLQMNSLRAEDTAMYYCARTTVTTGDAFDIWGQGTMVTVSSASTKGPSVFPLAPSSKS

SEQ ID NO: 827 - protein, 108 aa, synthetic construct
  REGION 1..108: note = Synthetic polypeptide
QDIQMTQSPSSLSASVGDRVTITCRASQGIRNDLGWYQHKPGKAPKLLIYAASILQSGVPSRFSGTASGTDFTLTISSLQPEDFATYFCLQDYEYPLTFGGGTKLDIK

SEQ ID NO: 828 - protein, 135 aa, synthetic construct
  REGION 1..135: note = Synthetic polypeptide
EVQLLESGGGLVQPGGSLRLSCAASGFTFSLYSMYWVRQAPGKGLEWVSRIRPSGGGTVYADSVKGRFTISRDNSKNTLYLQMNSLRAEDTAVYYCARDPLYSSGDVWGQGTTVTVSSASTKGPSVFPLAPSSKS

SEQ ID NO: 829 - protein, 108 aa, synthetic construct
  REGION 1..108: note = Synthetic polypeptide
QDIQMTQSPSSLSASVGDRVTITCRASQSIGIYLNWYHQKPGKAPNLLIYGASSLQSGVPSRFSGSGSGTDFTLTISSLQPGDFATYYCQHSYSTPFTFGGGTKVEIK

SEQ ID NO: 830 - protein, 137 aa, synthetic construct
  REGION 1..137: note = Synthetic polypeptide
EVQLLESGGGLVQPGGSLRLSCAASGFTFSSYAMVWVRQAPGKGLEWVSSIGSSGGFTLYADSVKGRFTISRDNSKNTLYLQMNSLRAEDTAVYYCASMNLGGGDAFDIWGQGTMVTVSSASTKGPSVFPLAPSSKS

SEQ ID NO: 831 - protein, 110 aa, synthetic construct
  REGION 1..110: note = Synthetic polypeptide
QSALTQPPSVSVSPGQTASITCSGDKLGEKYVSWYQQKPGQSPVVVIYQDNKRPSGIPERFSGSNSGNTATLTISGTQAVDEADYYCQAWDSYTVVFGGGSKLTVLGQPK

SEQ ID NO: 832 - protein, 142 aa, synthetic construct
  REGION 1..142: note = Synthetic polypeptide
EVQLLESGGGLVQPGGSLRLSCAASGFTFSDYEMHWVRQAPGKGLEWVSGISPSGGKTQYADSVKGRFTISRDNSKNTLYLQMNSLRAEDTAVYYCARDLKWGGRGSPDWYFDLWGRGTLVTVSSASTKGPSVFPLAPSSKS

SEQ ID NO: 833 - protein, 108 aa, synthetic construct
  REGION 1..108: note = Synthetic polypeptide
QDIQMTQSPSSLSASVGDRVTITCRASQSISSYLNWYQQKPGKAPKLLIYAASSLQSGVPSRFSGSGSGTDFTLTISSLQPEDFATYYCQQSYSTPPTFGGGTKVEIK

SEQ ID NO: 834 - protein, 137 aa, synthetic construct
  REGION 1..137: note = Synthetic polypeptide
EVQLLESGGGLVQPGGSLRLSCAASGFTFSNYPMDWVRQAPGKGLEWVSSISSSGGWTNYADSVKGRFTISRDNSKNTLYLQMNSLRAEDTAVYYCATDTSGSYLGFDYWGQGTLVTVSSASTKGPSVFPLAPSSKS

SEQ ID NO: 835 - protein, 108 aa, synthetic construct
  REGION 1..108: note = Synthetic polypeptide
QDIQMTQSPSSLSASVGDRVSITCRASQSISTYLNWYQHKPGKAPTLLIYGAFSLQSGVPSRFSGSGSGTDFALTISSLQPEDFATYYCQQSHSTPPTFGQGTRVEIK

SEQ ID NO: 836 - protein, 137 aa, synthetic construct
  REGION 1..137: note = Synthetic polypeptide
EVQLLESGGGLVQPGGSLRLSCAASGFTFSQYKMLWVRQAPGKGLEWVSGIGPSGGLTAYADSVKGRFTISRDNSKNTLYLQMNSLRAEDTAVYYCARAPWFGELGMDVWGQGTTVTVSSASTKGPSVFPLAPSSKS

SEQ ID NO: 837 - protein, 108 aa, synthetic construct
  REGION 1..108: note = Synthetic polypeptide
QDIQMTQSPSSLSASVGDRVTITCRASQSISAYLNWYQQKPGKAPQLLMYGVGSLQSGVPSRFSGSGSGTDFTLTISSLQPEDFATYFCQQGYTTPVTFGGGTKVEIK

SEQ ID NO: 838 - protein, 137 aa, synthetic construct
  REGION 1..137: note = Synthetic polypeptide
EVQLLESGGGLVQPGGSLRLSCAASGFTFSWYRMDWVRQAPGKGLEWVSSIWPSGGLTSYADSVKGRFTISRDNSKNTLYLQMNSLRAEDTAVYYCARGWAPGGDAFDIWGQGTMVTVSSASTKGPSVFPLAPSSKS

SEQ ID NO: 839 - protein, 108 aa, synthetic construct
  REGION 1..108: note = Synthetic polypeptide
QDIQMTQSPSSLSASVGDRVTITCRASQSISSYLNWYQQKPGKAPKLLIYAASSLQSGVPSRFSGSGSGTDFTLTISSLQPEDFATYYCQQSYSTPYTFGQGTKLEIK

SEQ ID NO: 840 - protein, 138 aa, synthetic construct
  REGION 1..138: note = Synthetic polypeptide
EVQLLESGGGLVQPGGSLRLSCAASGFTFSDYTMWWVRQAPGKGLEWVSSISSSGGITFYADSVKGRFTISRDNSKNTLYLQMNSLRAEDTAVYYCARSADTAMGGAFDIWGQGTMVTVSSASTKGPSVFPLAPSSKS

SEQ ID NO: 841 - protein, 106 aa, synthetic construct
  REGION 1..106: note = Synthetic polypeptide
QYELTQPPAVSVSPGQTATITCSGDKLGDEYAAWYQQKPGQSPVLVIYQDRKRPSGIPERFSGSNFGNTATLTITGTQVMDEADYYCQAWGKRNVVFGGGTKLTVL

SEQ ID NO: 842 - protein, 139 aa, synthetic construct
  REGION 1..139: note = Synthetic polypeptide
EVQLLESGGGLVQPGGSLRLSCAASGFTFSWYQMMWVRQAPGKGLEWVSSISPSGGITEYADSVKGRFTISRDNSKNTLYLQMNSLRAEDTAVYYCARDRSSGWYYYGMDVWGQGTTVTVSSASTKGPSVFPLAPSSKS

SEQ ID NO: 843 - protein, 108 aa, synthetic construct
  REGION 1..108: note = Synthetic polypeptide
QDIQMTQSPSSLSASVGDRVTITCRASQSISSYLNWYQQKPGKAPKLLIYAASSLQSGVPSRFSGSGSGTDFTLTISSLQPEDFATYYCQQSYSTPRTFGQGTKVEIK

SEQ ID NO: 844 - protein, 136 aa, synthetic construct
  REGION 1..136: note = Synthetic polypeptide
EVQLLESGGGLVQPGGSLRLSCAASGFTFSSYMMHWVRQAPGKGLEWVSGIYPSGGWTDYADSVKGRFTISRDNSKNTLYLQMNSLRAEDTATYYCARLVAGLDAFDIWGQGTMVTVSSASTKGPSVFPLAPSSKS

SEQ ID NO: 845 - protein, 108 aa, synthetic construct; identical to SEQ ID NO: 813
  REGION 1..108: note = Synthetic polypeptide

SEQ ID NO: 846 - protein, 137 aa, synthetic construct
  REGION 1..137: note = Synthetic polypeptide
EVQLLESGGGLVQPGGSLRLSCAASGFTFSWYPMTWVRQAPGKGLEWVSSIGPSGGQTIYADSVKGRFTISRDNSKNTLYLQMNSLRAEDTAVYYCTTEYGDYGGGFDPWGQGTLVTVSSASTKGPSVFPLAPSSKS

SEQ ID NO: 847 - protein, 108 aa, synthetic construct
  REGION 1..108: note = Synthetic polypeptide
QDIQMTQSPSFLSASVGDRVTITCRASQGISSYLAWYQQKPGKAPKLLIYAASSLQSGVPSRFSGSGSGTDFTLTISSLQPEDFATYYCQQSYNTLRTFGPGTKVDLK

SEQ ID NO: 848 - protein, 139 aa, synthetic construct
  REGION 1..139: note = Synthetic polypeptide
EVQLLESGGGLVQPGGSLRLSCAASGFTFSSYHMMWVRQAPGKGLEWVSSIYPSGGATMYADSVKGRFTISRDNSKNTLYLQMNSLRAEDTAMYYCARDGYHYGDYTYFQHWGQGTLVTVSSASTKGPSVFPLAPSSKS

SEQ ID NO: 849 - protein, 108 aa, synthetic construct; identical to SEQ ID NO: 805
  REGION 1..108: note = Synthetic polypeptide

SEQ ID NO: 850 - protein, 136 aa, synthetic construct; identical to SEQ ID NO: 806
  REGION 1..136: note = Synthetic polypeptide

SEQ ID NO: 851 - protein, 108 aa, synthetic construct
  REGION 1..108: note = Synthetic polypeptide
QDIQMTQSPSSLSASVGDRVTITCRASQRISYYLTWYQQKPGKVPKLLIYAASSLESGVPSRFSGSGSGTDFTLTISNLQPEDFATYYCQQAFSTPFTFGGGTKVEIK

SEQ ID NO: 852 - protein, 136 aa, synthetic construct
  REGION 1..136: note = Synthetic polypeptide
EVQLLESGGGLVQPGGSLRLSCAASGFTFSAYYMVWVRQAPGKGLEWVSYISPSGGQTQYADSVKGRFTISRDNSKNTLYLQMNSLRAEDTAVYYCAREAISSSSFDYWGQGTLVTVSSASTKGPSVFPLAPSSKS

SEQ ID NO: 853 - protein, 108 aa, synthetic construct
  REGION 1..108: note = Synthetic polypeptide
QDIQMTQSPSSVSASVGDRITITCRTRQSISNYLNWYQQKPGEPPKLLIFAASSLQSGVPSRFSGSGTGTEFTLTISSLQPEDLAIYYCQQSYDIPFTFGQGTKLEIK

SEQ ID NO: 854 - protein, 136 aa, synthetic construct
  REGION 1..136: note = Synthetic polypeptide
EVQLLESGGGLVQPGGSLRLSCAASGFTFSEYDMAWVRQAPGKGLEWVSYIVSSGGFTSYADSVKGRFTISRDNSKNTLYLQMNSLRAEDTAVYYCTTWAGWIAAADYWGQGTLVTVSSASTKGPSVFPLAPSSKS

SEQ ID NO: 855 - protein, 108 aa, synthetic construct
  REGION 1..108: note = Synthetic polypeptide
QDIQMTQSPSSLSASVGDRVTITCRASQSISNYLNWYQQKPGKAPKFLIYAASSLQSGVPSRFSGSGSGTDFTLSISSLQPEDFATYYCQQSYSTPQTFGQGTKVEMK

SEQ ID NO: 856 - protein, 136 aa, synthetic construct
  REGION 1..136: note = Synthetic polypeptide
EVQLLESGGGLVQPGGSLRLSCAASGFTFSAYQMAWVRQAPGKGLEWVSVIYSSGGYTDYADSVKGRFTISRDNSKNTLYLQMNSLRAEDTAVYYCARHNWNDGAFDIWGQGTMVTVSSASTKGPSVFPLAPSSKS

SEQ ID NO: 857 - protein, 107 aa, synthetic construct
  REGION 1..107: note = Synthetic polypeptide
QDIQMTQSPSSLSASVGDRVTITCRASQSISSYLNWYQQKPGKAPKLLIYAASSLQSGVPSRFSGSGSGTDFTLTISSLQPEDFATYYCQQSYSTLTFGGGTKVEIK

SEQ ID NO: 858 - protein, 137 aa, synthetic construct
  REGION 1..137: note = Synthetic polypeptide
EVQLLESGGGLVQPGGSLRLSCAASGFTFSWYAMHWVRQAPGKGLEWVSGIYSSGGYTKYADSVKGRFTISRDNSKNTLYLQMNSLRAEDTAVYYCARDLSNGDDVFDIWGQGTMVTVSSASTKGPSVFPLAPSSKS

SEQ ID NO: 859 - protein, 108 aa, synthetic construct
  REGION 1..108: note = Synthetic polypeptide
QDIQMTQSPSSLSASVGDRVTITCRASQSINFYLNWYQQKPGKAPKLLIYVASSLESGVPSRFSGSASGTEFTLTISSLQPEDFATYYCLQSYSAPYTFGQGTKVEIT

SEQ ID NO: 860 - protein, 137 aa, synthetic construct
  REGION 1..137: note = Synthetic polypeptide
EVQLLESGGGLVQPGGSLRLSCAASGFTFSYYQMGWVRQAPGKGLEWVSSIYPSGGMTDYADSVKGRFTISRDNSKNTLYLQMNSLRAEDTAVYYCTRGSPWGDDAFDIWGQGTMVTVSSASTKGPSVFPLAPSSKS

SEQ ID NO: 861 - protein, 108 aa, synthetic construct
  REGION 1..108: note = Synthetic polypeptide
QDIQMTQSPSSLSASEGDMVTITCRTSRRIGTYLNWYQQKPGKAPKLLIYGASSLQSGVPSRFSGSGSGTDFTLTVSSLQPEDVGTYYCQQSFSSPWTFGPGTKVEIK

SEQ ID NO: 862 - protein, 137 aa, synthetic construct
  REGION 1..137: note = Synthetic polypeptide
EVQLLESGGGLVQPGGSLRLSCAASGFTFSWYPMQWVRQAPGKGLEWVSYIYPSGGGTDYADSVKGRFTISRDNSKNTLYLQMNSLRAEDTATYYCATSSGWLGDAFDIWGQGTMVTVSSASTKGPSVFPLAPSSKS

SEQ ID NO: 863 - protein, 110 aa, synthetic construct
  REGION 1..110: note = Synthetic polypeptide
QDIQMTQSPSSLSASVGDRVTITCRASQSIATYLNWYQQKPGRAPKLLIYAASSLQSGVPSRFVGGGSGSGTHFTLTISSLQPEDFATYYCQQSYSTRETFGQGTKVEIK

SEQ ID NO: 864 - protein, 137 aa, synthetic construct
  REGION 1..137: note = Synthetic polypeptide
EVQLLESGGGLVQPGGSLRLSCAASGFTFSWYTMHWVRQAPGKGLEWVSVIYPSGGPTSYADSVKGRFTISRDNSKNTLYLQMNSLRAEDTATYYCARDGSGSYLGFDYWGQGTLVTVSSASTKGPSVFPLAPSSKS

SEQ ID NO: 865 - protein, 108 aa, synthetic construct; identical to SEQ ID NO: 783
  REGION 1..108: note = Synthetic polypeptide

SEQ ID NO: 866 - protein, 135 aa, synthetic construct; identical to SEQ ID NO: 784
  REGION 1..135: note = Synthetic polypeptide

SEQ ID NO: 867 - protein, 108 aa, synthetic construct
  REGION 1..108: note = Synthetic polypeptide
QDIQMTQSPSSVSASVGDRVTINCRASQDISNWLAWYQQKPGKAPNLLIYAASSLQTGAPSRFSGSGSGTDFTLTISSLQPEDFGTYVCQQSYSLPWTFGLGTKVEVR

SEQ ID NO: 868 - protein, 141 aa, synthetic construct
  REGION 1..141: note = Synthetic polypeptide
EVQLLESGGGLVQPGGSLRLSCAASGFTFSLYDMTWVRQAPGKGLEWVSGISSSGGVTIYADSVKGRFTISRDNSKNTLYLQMNSLRAEDTAVYYCARTYYYDSSGYADAFDIWGQGTMVTVSSASTKGPSVFPLAPSSKS

SEQ ID NO: 869 - protein, 108 aa, synthetic construct
  REGION 1..108: note = Synthetic polypeptide
QDIQMTQSPSSLSASVGDRVTITCRASQSINTYLNWYQQKPGKAPKVLIHAASTLESGVPSRFSGSGSGTDFTLTISSLQPEDFATYYCQQSYSTPPTFGQGTKVEIK

SEQ ID NO: 870 - protein, 135 aa, synthetic construct
  REGION 1..135: note = Synthetic polypeptide
EVQLLESGGGLVQPGGSLRLSCAASGFTFSVYLMHWVRQAPGKGLEWVSGISPSGGYTQYADSVKGRFTISRDNSKNTLYLQMNSLRAEDTAVYYCARPGGLDAFDIWGQGTMVTVSSASTKGPSVFPLAPSSKS

SEQ ID NO: 871 - protein, 108 aa, synthetic construct
  REGION 1..108: note = Synthetic polypeptide
QDIQMTQSPSSLSASVGDRVTITCRASQSISSYLNWYQQKPGKAPKLLIYAASSLQSGVPSRFSGSGSGTDFTLTISSLQPEDFATYYCQQSYSTPLTFGGGTKVEIK

SEQ ID NO: 872 - protein, 136 aa, synthetic construct
  REGION 1..136: note = Synthetic polypeptide
EVQLLESGGGLVQPGGSLRLSCAASGFTFSRYIMWWVRQAPGKGLEWVSGIYSSGGYTQYADSVKGRFTISRDNSKNTLYLQMNSLRAEDTAMYYCARELEGLGGFDYWGQGTLVTVSSASTKGPSVFPLAPSSKS

SEQ ID NO: 873 - protein, 108 aa, synthetic construct
  REGION 1..108: note = Synthetic polypeptide
QDIQMTQSPSSVSASVGDRVTITCRASQGISSWLAWYQQKPGKAPKLLIYATSGLQSGVPSRFSGSGSGTDFTLTISSLQPEDFATYYCQQAKSFPLTFGGGTRVEIK

SEQ ID NO: 874 - protein, 139 aa, synthetic construct
  REGION 1..139: note = Synthetic polypeptide
EVQLLESGGGLVQPGGSLRLSCAASGFTFSDYTMYWVRQAPGKGLEWVSSIVPSGGHTLYADSVKGRFTISRDNSKNTLYLQMNSLRAEDTAVYYCAKDHLSSWYGGFFDYWGQGTLVTVSSASTKGPSVFPLAPSSKS

SEQ ID NO: 875 - protein, 108 aa, synthetic construct
  REGION 1..108: note = Synthetic polypeptide
QDIQMTQSPSSLSASVGDRVTITCRASQSISSYLNWYQQKPGKAPKLLIYAASSLQSGVPSRFSGSGSGTDFTLTISSLQPEDFATYYCQQSYSTRYTFGQGTKLEIK

SEQ ID NO: 876 - protein, 136 aa, synthetic construct
  REGION 1..136: note = Synthetic polypeptide
EVQLLESGGGLVQPGGSLRLSCAASGFTFSGYDMMWVRQAPGKGLEWVSVISSSGGNTAYADSVKGRFTISRDNSKNTLYLQMNSLRAEDTAVYYCARESSGLYYFDYWGQGTLVTVSSASTKGPSVFPLAPSSKS

SEQ ID NO: 877 - protein, 108 aa, synthetic construct
  REGION 1..108: note = Synthetic polypeptide
QDIQMTQSPSSLSASVGDTVSITCRASQSITIYLNWYQHKPGKAPNLLIYGASNLHSGVPSRFSGSGSGTDFTLTISSLQPEDFATYYCQQSYDTPLTFGGGTKVEIK

SEQ ID NO: 878 - protein, 136 aa, synthetic construct
  REGION 1..136: note = Synthetic polypeptide
EVQLLESGGGLVQPGGSLRLSCAASGFTFSWYPMYWVRQAPGKGLEWVSSIGSSGGPTPYADSVKGRFTISRDNSKNTLYLQMNSLRAEDTAVYYCARWADYGGSLDYWGQGTLVTVSSASTKGPSVFPLAPSSKS

SEQ ID NO: 879 - protein, 110 aa, synthetic construct
  REGION 1..110: note = Synthetic polypeptide
QSVLTQPPSVSEAPRQRVTISCSGSSSNIGNNAVSWYQQLPGKAPKLLIYYDDLLPSGVSDRFSGSKSGTSASLAISGLRSEDEADYYCAAWDDSLNGFVFGTGTKVTVL

SEQ ID NO: 880 - protein, 137 aa, synthetic construct
  REGION 1..137: note = Synthetic polypeptide
EVQLLESGGGLVQPGGSLRLSCAASGFTFSRYPMMWVRQAPGKGLEWVSVIYPSGGDTFYADSVKGRFTISRDNSKNTLYLQMNSLRAEDTAVYYCASGDDYLWEAAVYWGQGTLVTVSSASTKGPSVFPLAPSSKS

SEQ ID NO: 881 - protein, 110 aa, synthetic construct
  REGION 1..110: note = Synthetic polypeptide
QDIQMTQSPATLSASPGETVTLSCRASQNIGNDVAWYRQRPGQAPRLLIHHASTRAYGIPARLRGSGSATEFTLTITSLEPEDFAIYYCQQFYDWPAHTFALGTRLEIKR

SEQ ID NO: 882 - protein, 140 aa, synthetic construct
  REGION 1..140: note = Synthetic polypeptide
EVQLLESGGGLVQPGGSLRLSCAASGFTFSYYHMWWVRQAPGKGLEWVSGISPSGGFTFYADSVKGRFTISRDNSKNTLYLQMNSLRAEDTAVYYCARDYYYDSSGYSPLGYWGQGTLVTVSSASTKGPSVFPLAPSSKS

SEQ ID NO: 883 - protein, 108 aa, synthetic construct
  REGION 1..108: note = Synthetic polypeptide
QDIQMTQSPSSLSSSVGDSATITCRASQSISIYLNWYQQKPGKAPKILIYGASQLESGVPSRFSGSGSGTDFTLTVSGLQPEDFATYWCQQSYNVPYTFGQGTKLEIK

SEQ ID NO: 884 - protein, 136 aa, synthetic construct
  REGION 1..136: note = Synthetic polypeptide
EVQLLESGGGLVQPGGSLRLSCAASGFTFSFYKMIWVRQAPGKGLEWVSSISSSGGSTQYADSVKGRFTISRDNSKNTLYLQMNSLRAEDTAVYYCARDRVDLGYLDYWGQGTLVTVSSASTKGPSVFPLAPSSKS

SEQ ID NO: 885 - protein, 108 aa, synthetic construct
  REGION 1..108: note = Synthetic polypeptide
QDIQMTQSPSSLSASVRDRVTITCRTSQNINTYLNWYYQAPGRAPKLLIFGVSSLHRGVSSRFSGSGDGTEFTLTISSLQPEDIGTYFCQQSYSSPWTFGQGTKVEIK

SEQ ID NO: 886 - protein, 136 aa, synthetic construct
  REGION 1..136: note = Synthetic polypeptide
EVQLLESGGGLVQPGGSLRLSCAASGFTFSQYLMMWVRQAPGKGLEWVSSIYPSGGYTSYADSVKGRFTISRDNSKNTLYLQMNSLRAEDTAVYYCARVSTAVADNDYWGQGTLVTVSSASTKGPSVFPLAPSSKS

SEQ ID NO: 887 - protein, 109 aa, synthetic construct
  REGION 1..109: note = Synthetic polypeptide
QDIQMTQSPSSLSASVGDRVTITCRASQTIDNYLHWYQQKPGKAPKVLIHDASSLQSGVPPRFSGSGSGTDFTLTISSLQPEDFATYYCQQSYDTPQYTFGQGTKLEIK

SEQ ID NO: 888 - protein, 135 aa, synthetic construct
  REGION 1..135: note = Synthetic polypeptide
EVQLLESGGGLVQPGGSLRLSCAASGFTFSLYDMNWVRQAPGKGLEWVSGISPSGGQTMYADSVKGRFTISRDNSKNTLYLQMNSLRAEDTAVYYCARQPMISAFDIWGQGTMVTVSSASTKGPSVFPLAPSSKS

SEQ ID NO: 889 - protein, 109 aa, synthetic construct
  REGION 1..109: note = Synthetic polypeptide
QDIQMTQSPSSLSASVGDRVTITCRASQSISSYLNWYQQKPGKAPKLLIYAASSLQSGVPSRFSGSGSGTDFTLTISSLQPEDFATYYCQQSYSTPPWTFGQGTKVEIK

SEQ ID NO: 890 - protein, 136 aa, synthetic construct
  REGION 1..136: note = Synthetic polypeptide
EVQLLESGGGLVQPGGSLRLSCAASGFTFSLYAMWWVRQAPGKGLEWVSYISSSGGFTSYADSVKGRFTISRDNSKNTLYLQMNSLRAEDTAVYYCARYRVGVAATDYWGQGTLVTVSSASTKGPSVFPLAPSSKS

SEQ ID NO: 891 - protein, 108 aa, synthetic construct
  REGION 1..108: note = Synthetic polypeptide
QDIQMTQSPSSLSASVRDRVTITCRASQSISTYLNWYQQKPGEAPKLLVFAASSLQSGVPSRFSGSGSGTDFTLSISSLQPEDFATYYCQQSYSTPHTFGQGAKVEIK

SEQ ID NO: 892 - protein, 136 aa, synthetic construct
  REGION 1..136: note = Synthetic polypeptide
EVQLLESGGGLVQPGGSLRLSCAASGFTFSGYIMHWVRQAPGKGLEWVSWIYPSGGWTEYADSVKGRFTISRDNSKNTLYLQMNSLRAEDTAVYYCARDAPGVGAIDYWGQGTLVTVSSASTKGPSVFPLAPSSKS

SEQ ID NO: 893 - protein, 108 aa, synthetic construct
  REGION 1..108: note = Synthetic polypeptide
QDIQMTQSPSSLSASEGDRVTITCRASQDISVYLNWYQMKSGKAPKLLIYGGASLQSGVPARFSGSGYGTDFTLTITDLRPEDFATYYCQQSYSLPFTFGGGTKVEIK

SEQ ID NO: 894 - protein, 137 aa, synthetic construct
  REGION 1..137: note = Synthetic polypeptide
EVQLLESGGGLVQPGGSLRLSCAASGFTFSMYWMQWVRQAPGKGLEWVSYIYPSGGPTKYADSVKGRFTISRDNSKNTLYLQMNSLRAEDTAVYYCARPSGSYGDAFDIWGQGTMVTVSSASTKGPSVFPLAPSSKS

SEQ ID NO: 895 - protein, 108 aa, synthetic construct
  REGION 1..108: note = Synthetic polypeptide
QDIQMTQSPSTLSASVGDRVTITCRASQNISSYLNWYQQKPGKAPKLLIYAASSLQSGVPSRFSGSGSGTDFTLTISSLQPEDFATYSCQQSYSTPRTFGQGTKVEIK

SEQ ID NO: 896 - protein, 136 aa, synthetic construct
  REGION 1..136: note = Synthetic polypeptide
EVQLLESGGGLVQPGGSLRLSCAASGFTFSLYIMGWVRQAPGKGLEWVSGIYPSGGFTMYADSVKGRFTISRDNSKNTLYLQMNSLRAEDTAVYYCARESSGVAAPDYWGQGTLVTVSSASTKGPSVFPLAPSSKS

SEQ ID NO: 897 - protein, 112 aa, synthetic construct
  REGION 1..112: note = Synthetic polypeptide
QDIQMTQSPLSLPVTPGEPASISCRSSQSLLHSRGYNYLDWYLQKPGQSPQLLIYLGSNRASGVPDRFSGSGSGTDFTLKISRVEAEDVGVYYCMQALQRRTFGQGTKLEIK

SEQ ID NO: 898 - protein, 144 aa, synthetic construct
  REGION 1..144: note = Synthetic polypeptide
EVQLLESGGGLVQPGGSLRLSCAASGFTFSYYTMIWVRQAPGKGLEWVSGIRSSGGGTRYADSVKGRFTISRDNSKNTLYLQMNSLRAEDTAVYYCAKDGSRYSYGSIYYYYGMDAWGQGTTVTVSSASTKGPSVFPLAPSSKS

SEQ ID NO: 899 - protein, 17 aa, synthetic construct
  REGION 1..17: note = Synthetic peptide
GGLLLWFRELKSNYFDY

SEQ ID NO: 900 - DNA, 42 bp, synthetic construct
  misc_feature 1..42: note = Synthetic primer
  source 1..42: mol_type = other DNA
  misc_difference 22..23: note = a, c, t, g, unknown or other
ggcggtctattactatggttcnnkgagctgaagtctaactac

SEQ ID NO: 901 - DNA, 42 bp, synthetic construct
  misc_feature 1..42: note = Synthetic primer
  source 1..42: mol_type = other DNA
  misc_difference 19..20: note = a, c, t, g, unknown or other
ggcggtctattactatggnnkagggagctgaagtctaactac

SEQ ID NO: 902 - DNA, 42 bp, synthetic construct
  misc_feature 1..42: note = Synthetic primer
  source 1..42: mol_type = other DNA
  misc_difference 16..17: note = a, c, t, g, unknown or other
ggcggtctattactannkttcagggagctgaagtctaactac

SEQ ID NO: 903 - DNA, 42 bp, synthetic construct
  misc_feature 1..42: note = Synthetic primer
  source 1..42: mol_type = other DNA
  misc_difference 25..26: note = a, c, t, g, unknown or other
ggcggtctattactatggttcaggnnkctgaagtctaactac

SEQ ID NO: 904 - protein, 17 aa, synthetic construct
  REGION 1..17: note = Synthetic peptide
GGLLLWFRELKSNYFDY

SEQ ID NO: 905 - protein, 17 aa, synthetic construct
  REGION 1..17: note = Synthetic peptide
GGLLLAFRELKSNYFDY

SEQ ID NO: 906 - protein, 17 aa, synthetic construct
  REGION 1..17: note = Synthetic peptide
GGLLLCFRELKSNYFDY

SEQ ID NO: 907 - protein, 17 aa, synthetic construct
  REGION 1..17: note = Synthetic peptide
GGLLLDFRELKSNYFDY

SEQ ID NO: 908 - protein, 17 aa, synthetic construct
  REGION 1..17: note = Synthetic peptide
GGLLLEFRELKSNYFDY

SEQ ID NO: 909 - protein, 17 aa, synthetic construct
  REGION 1..17: note = Synthetic peptide
GGLLLGFRELKSNYFDY

SEQ ID NO: 910 - protein, 17 aa, synthetic construct
  REGION 1..17: note = Synthetic peptide
GGLLLKFRELKSNYFDY

SEQ ID NO: 911 - protein, 17 aa, synthetic construct
  REGION 1..17: note = Synthetic peptide
GGLLLLFRELKSNYFDY

SEQ ID NO: 912 - protein, 17 aa, synthetic construct
  REGION 1..17: note = Synthetic peptide
GGLLLMFRELKSNYFDY

SEQ ID NO: 913 - protein, 17 aa, synthetic construct
  REGION 1..17: note = Synthetic peptide
GGLLLPFRELKSNYFDY

SEQ ID NO: 914 - protein, 17 aa, synthetic construct
  REGION 1..17: note = Synthetic peptide
GGLLLQFRELKSNYFDY

SEQ ID NO: 915 - protein, 17 aa, synthetic construct
  REGION 1..17: note = Synthetic peptide
GGLLLRFRELKSNYFDY

SEQ ID NO: 916 - protein, 17 aa, synthetic construct
  REGION 1..17: note = Synthetic peptide
GGLLLSFRELKSNYFDY

SEQ ID NO: 917 - protein, 17 aa, synthetic construct
  REGION 1..17: note = Synthetic peptide
GGLLLTFRELKSNYFDY

SEQ ID NO: 918 - protein, 17 aa, synthetic construct
  REGION 1..17: note = Synthetic peptide
GGLLLVFRELKSNYFDY

SEQ ID NO: 919 - protein, 17 aa, synthetic construct
  REGION 1..17: note = Synthetic peptide
GGLLLWARELKSNYFDY

SEQ ID NO: 920 - protein, 17 aa, synthetic construct
  REGION 1..17: note = Synthetic peptide
GGLLLWCRELKSNYFDY

SEQ ID NO: 921 - protein, 17 aa, synthetic construct
  REGION 1..17: note = Synthetic peptide
GGLLLWDRELKSNYFDY

SEQ ID NO: 922 - protein, 17 aa, synthetic construct
  REGION 1..17: note = Synthetic peptide
GGLLLWERELKSNYFDY

SEQ ID NO: 923 - protein, 17 aa, synthetic construct
  REGION 1..17: note = Synthetic peptide
GGLLLWGRELKSNYFDY

SEQ ID NO: 924 - protein, 17 aa, synthetic construct
  REGION 1..17: note = Synthetic peptide
GGLLLWKRELKSNYFDY

SEQ ID NO: 925 - protein, 17 aa, synthetic construct
  REGION 1..17: note = Synthetic peptide
GGLLLWLRELKSNYFDY

SEQ ID NO: 926 - protein, 17 aa, synthetic construct
  REGION 1..17: note = Synthetic peptide
GGLLLWMRELKSNYFDY

SEQ ID NO: 927 - protein, 17 aa, synthetic construct
  REGION 1..17: note = Synthetic peptide
GGLLLWNRELKSNYFDY

SEQ ID NO: 928 - protein, 17 aa, synthetic construct
  REGION 1..17: note = Synthetic peptide
GGLLLWPRELKSNYFDY

SEQ ID NO: 929 - protein, 17 aa, synthetic construct
  REGION 1..17: note = Synthetic peptide
GGLLLWQRELKSNYFDY

SEQ ID NO: 930 - protein, 17 aa, synthetic construct
  REGION 1..17: note = Synthetic peptide
GGLLLWRRELKSNYFDY

SEQ ID NO: 931 - protein, 17 aa, synthetic construct
  REGION 1..17: note = Synthetic peptide
GGLLLWSRELKSNYFDY

SEQ ID NO: 932 - protein, 17 aa, synthetic construct
  REGION 1..17: note = Synthetic peptide
GGLLLWTRELKSNYFDY

SEQ ID NO: 933 - protein, 17 aa, synthetic construct
  REGION 1..17: note = Synthetic peptide
GGLLLWWRELKSNYFDY

SEQ ID NO: 934 - protein, 17 aa, synthetic construct
  REGION 1..17: note = Synthetic peptide
GGLLLWYRELKSNYFDY

SEQ ID NO: 935 - protein, 17 aa, synthetic construct
  REGION 1..17: note = Synthetic peptide
GGLLLWFAELKSNYFDY

SEQ ID NO: 936 - protein, 17 aa, synthetic construct
  REGION 1..17: note = Synthetic peptide
GGLLLWFCELKSNYFDY

SEQ ID NO: 937 - protein, 17 aa, synthetic construct
  REGION 1..17: note = Synthetic peptide
GGLLLWFEELKSNYFDY

SEQ ID NO: 938 - protein, 17 aa, synthetic construct
  REGION 1..17: note = Synthetic peptide
GGLLLWFFELKSNYFDY

SEQ ID NO: 939 - protein, 17 aa, synthetic construct
  REGION 1..17: note = Synthetic peptide
GGLLLWFGELKSNYFDY

SEQ ID NO: 940 - protein, 17 aa, synthetic construct
  REGION 1..17: note = Synthetic peptide
GGLLLWFHELKSNYFDY

SEQ ID NO: 941 - protein, 17 aa, synthetic construct
  REGION 1..17: note = Synthetic peptide
GGLLLWFKELKSNYFDY

SEQ ID NO: 942 - protein, 17 aa, synthetic construct
  REGION 1..17: note = Synthetic peptide
GGLLLWFLELKSNYFDY

SEQ ID NO: 943 - protein, 17 aa, synthetic construct
  REGION 1..17: note = Synthetic peptide
GGLLLWFMELKSNYFDY

SEQ ID NO: 944 - protein, 17 aa, synthetic construct
  REGION 1..17: note = Synthetic peptide
GGLLLWFPELKSNYFDY

SEQ ID NO: 945 - protein, 17 aa, synthetic construct
  REGION 1..17: note = Synthetic peptide
GGLLLWFQELKSNYFDY

SEQ ID NO: 946 - protein, 17 aa, synthetic construct
  REGION 1..17: note = Synthetic peptide
GGLLLWFSELKSNYFDY

SEQ ID NO: 947 - protein, 17 aa, synthetic construct
  REGION 1..17: note = Synthetic peptide
GGLLLWFTELKSNYFDY

SEQ ID NO: 948 - protein, 17 aa, synthetic construct
  REGION 1..17: note = Synthetic peptide
GGLLLWFVELKSNYFDY

SEQ ID NO: 949 - protein, 17 aa, synthetic construct
  REGION 1..17: note = Synthetic peptide
GGLLLWFWELKSNYFDY

SEQ ID NO: 950 - protein, 17 aa, synthetic construct
  REGION 1..17: note = Synthetic peptide
GGLLLWFYELKSNYFDY

SEQ ID NO: 951 - protein, 17 aa, synthetic construct
  REGION 1..17: note = Synthetic peptide
GGLLLWFRALKSNYFDY

SEQ ID NO: 952 - protein, 17 aa, synthetic construct
  REGION 1..17: note = Synthetic peptide
GGLLLWFRCLKSNYFDY

SEQ ID NO: 953 - protein, 17 aa, synthetic construct
  REGION 1..17: note = Synthetic peptide
GGLLLWFRGLKSNYFDY

SEQ ID NO: 954 - protein, 17 aa, synthetic construct
  REGION 1..17: note = Synthetic peptide
GGLLLWFRHLKSNYFDY

SEQ ID NO: 955 - protein, 17 aa, synthetic construct
  REGION 1..17: note = Synthetic peptide
GGLLLWFRKLKSNYFDY

SEQ ID NO: 956 - protein, 17 aa, synthetic construct
  REGION 1..17: note = Synthetic peptide
GGLLLWFRLLKSNYFDY

SEQ ID NO: 957 - protein, 17 aa, synthetic construct
  REGION 1..17: note = Synthetic peptide
GGLLLWFRNLKSNYFDY

SEQ ID NO: 958 - protein, 17 aa, synthetic construct
  REGION 1..17: note = Synthetic peptide
GGLLLWFRPLKSNYFDY

SEQ ID NO: 959 - protein, 17 aa, synthetic construct
  REGION 1..17: note = Synthetic peptide
GGLLLWFRQLKSNYFDY

SEQ ID NO: 960 - protein, 17 aa, synthetic construct
  REGION 1..17: note = Synthetic peptide
GGLLLWFRRLKSNYFDY

SEQ ID NO: 961 - protein, 17 aa, synthetic construct
  REGION 1..17: note = Synthetic peptide
GGLLLWFRSLKSNYFDY

SEQ ID NO: 962 - protein, 17 aa, synthetic construct
  REGION 1..17: note = Synthetic peptide
GGLLLWFRTLKSNYFDY

SEQ ID NO: 963 - protein, 17 aa, synthetic construct
  REGION 1..17: note = Synthetic peptide
GGLLLWFRVLKSNYFDY

SEQ ID NO: 964 - protein, 17 aa, synthetic construct
  REGION 1..17: note = Synthetic peptide
GGLLLWFRWLKSNYFDY

SEQ ID NO: 965 - protein, 17 aa, synthetic construct
  REGION 1..17: note = Synthetic peptide
GGLLLWFRYLKSNYFDY

SEQ ID NO: 966 - protein, 108 aa, synthetic construct; identical to SEQ ID NO: 265
  REGION 1..108: note = Synthetic polypeptide

SEQ ID NO: 967 - protein, 143 aa, synthetic construct
  REGION 1..143: note = Synthetic polypeptide
EVQLLESGGGLVQPGGSLRLSCAASGFTFSAYSMIWVRQAPGKGLEWVSYIRPSGGRTTYADSVKGRFTISRDNSKNTLYLQMNSLRAEDTAVYYCARGGLLLAFRELKSNYFDYWGQGTLVTVSSASTKGPSVFPLAPSSKS

SEQ ID NO: 968 - protein, 108 aa, synthetic construct; identical to SEQ ID NO: 265
  REGION 1..108: note = Synthetic polypeptide

SEQ ID NO: 969 - protein, 143 aa, synthetic construct
  REGION 1..143: note = Synthetic polypeptide
EVQLLESGGGLVQPGGSLRLSCAASGFTFSAYSMIWVRQAPGKGLEWVSYIRPSGGRTTYADSVKGRFTISRDNSKNTLYLQMNSLRAEDTAVYYCARGGLLLCFRELKSNYFDYWGQGTLVTVSSASTKGPSVFPLAPSSKS

SEQ ID NO: 970 - protein, 108 aa, synthetic construct; identical to SEQ ID NO: 265
  REGION 1..108: note = Synthetic polypeptide

SEQ ID NO: 971 - protein, 143 aa, synthetic construct
  REGION 1..143: note = Synthetic polypeptide
EVQLLESGGGLVQPGGSLRLSCAASGFTFSAYSMIWVRQAPGKGLEWVSYIRPSGGRTTYADSVKGRFTISRDNSKNTLYLQMNSLRAEDTAVYYCARGGLLLDFRELKSNYFDYWGQGTLVTVSSASTKGPSVFPLAPSSKS

SEQ ID NO: 972 - protein, 108 aa, synthetic construct; identical to SEQ ID NO: 265
  REGION 1..108: note = Synthetic polypeptide

SEQ ID NO: 973 - protein, 143 aa, synthetic construct
  REGION 1..143: note = Synthetic polypeptide
EVQLLESGGGLVQPGGSLRLSCAASGFTFSAYSMIWVRQAPGKGLEWVSYIRPSGGRTTYADSVKGRFTISRDNSKNTLYLQMNSLRAEDTAVYYCARGGLLLEFRELKSNYFDYWGQGTLVTVSSASTKGPSVFPLAPSSKS

SEQ ID NO: 974 - protein, 108 aa, synthetic construct; identical to SEQ ID NO: 265
  REGION 1..108: note = Synthetic polypeptide

SEQ ID NO: 975 - protein, 143 aa, synthetic construct
  REGION 1..143: note = Synthetic polypeptide
EVQLLESGGGLVQPGGSLRLSCAASGFTFSAYSMIWVRQAPGKGLEWVSYIRPSGGRTTYADSVKGRFTISRDNSKNTLYLQMNSLRAEDTAVYYCARGGLLLGFRELKSNYFDYWGQGTLVTVSSASTKGPSVFPLAPSSKS

SEQ ID NO: 976 - protein, 108 aa, synthetic construct; identical to SEQ ID NO: 265
  REGION 1..108: note = Synthetic polypeptide

SEQ ID NO: 977 - protein, 143 aa, synthetic construct
  REGION 1..143: note = Synthetic polypeptide
EVQLLESGGGLVQPGGSLRLSCAASGFTFSAYSMIWVRQAPGKGLEWVSYIRPSGGRTTYADSVKGRFTISRDNSKNTLYLQMNSLRAEDTAVYYCARGGLLLKFRELKSNYFDYWGQGTLVTVSSASTKGPSVFPLAPSSKS

SEQ ID NO: 978 - protein, 108 aa, synthetic construct; identical to SEQ ID NO: 265
  REGION 1..108: note = Synthetic polypeptide

SEQ ID NO: 979 - protein, 143 aa, synthetic construct
  REGION 1..143: note = Synthetic polypeptide
EVQLLESGGGLVQPGGSLRLSCAASGFTFSAYSMIWVRQAPGKGLEWVSYIRPSGGRTTYADSVKGRFTISRDNSKNTLYLQMNSLRAEDTAVYYCARGGLLLLFRELKSNYFDYWGQGTLVTVSSASTKGPSVFPLAPSSKS

SEQ ID NO: 980 - protein, 108 aa, synthetic construct; identical to SEQ ID NO: 265
  REGION 1..108: note = Synthetic polypeptide

SEQ ID NO: 981 - protein, 143 aa, synthetic construct
  REGION 1..143: note = Synthetic polypeptide
EVQLLESGGGLVQPGGSLRLSCAASGFTFSAYSMIWVRQAPGKGLEWVSYIRPSGGRTTYADSVKGRFTISRDNSKNTLYLQMNSLRAEDTAVYYCARGGLLLMFRELKSNYFDYWGQGTLVTVSSASTKGPSVFPLAPSSKS

SEQ ID NO: 982 - protein, 108 aa, synthetic construct; identical to SEQ ID NO: 265
  REGION 1..108: note = Synthetic polypeptide

SEQ ID NO: 983 - protein, 143 aa, synthetic construct
  REGION 1..143: note = Synthetic polypeptide
EVQLLESGGGLVQPGGSLRLSCAASGFTFSAYSMIWVRQAPGKGLEWVSYIRPSGGRTTYADSVKGRFTISRDNSKNTLYLQMNSLRAEDTAVYYCARGGLLLPFRELKSNYFDYWGQGTLVTVSSASTKGPSVFPLAPSSKS

SEQ ID NO: 984 - protein, 108 aa, synthetic construct; identical to SEQ ID NO: 265
  REGION 1..108: note = Synthetic polypeptide

SEQ ID NO: 985 - protein, 143 aa, synthetic construct
  REGION 1..143: note = Synthetic polypeptide
EVQLLESGGGLVQPGGSLRLSCAASGFTFSAYSMIWVRQAPGKGLEWVSYIRPSGGRTTYADSVKGRFTISRDNSKNTLYLQMNSLRAEDTAVYYCARGGLLLQFRELKSNYFDYWGQGTLVTVSSASTKGPSVFPLAPSSKS

SEQ ID NO: 986 - protein, 108 aa, synthetic construct; identical to SEQ ID NO: 265
  REGION 1..108: note = Synthetic polypeptide

SEQ ID NO: 987 - protein, 143 aa, synthetic construct
  REGION 1..143: note = Synthetic polypeptide
EVQLLESGGGLVQPGGSLRLSCAASGFTFSAYSMIWVRQAPGKGLEWVSYIRPSGGRTTYADSVKGRFTISRDNSKNTLYLQMNSLRAEDTAVYYCARGGLLLRFRELKSNYFDYWGQGTLVTVSSASTKGPSVFPLAPSSKS

SEQ ID NO: 988 - protein, 108 aa, synthetic construct; identical to SEQ ID NO: 265
  REGION 1..108: note = Synthetic polypeptide

SEQ ID NO: 989 - protein, 143 aa, synthetic construct
  REGION 1..143: note = Synthetic polypeptide
EVQLLESGGGLVQPGGSLRLSCAASGFTFSAYSMIWVRQAPGKGLEWVSYIRPSGGRTTYADSVKGRFTISRDNSKNILYLQMNSLRAEDTAVYYCARGGLLLSFRELKSNYFDYWGQGTLVTVSSASTKGPSVFPLAPSSKS

SEQ ID NO: 990 - protein, 108 aa, synthetic construct; identical to SEQ ID NO: 265
  REGION 1..108: note = Synthetic polypeptide

SEQ ID NO: 991 - protein, 143 aa, synthetic construct
  REGION 1..143: note = Synthetic polypeptide
EVQLLESGGGLVQPGGSLRLSCAASGFTFSAYSMIWVRQAPGKGLEWVSYIRPSGGRTTYADSVKGRFTISRDNSKNTLYLQMNSLRAEDTAVYYCARGGLLLTFRELKSNYFDYWGQGTLVTVSSASTKGPSVFPLAPSSKS

SEQ ID NO: 992 - protein, 108 aa, synthetic construct; identical to SEQ ID NO: 265
  REGION 1..108: note = Synthetic polypeptide

SEQ ID NO: 993 - protein, 143 aa, synthetic construct
  REGION 1..143: note = Synthetic polypeptide
EVQLLESGGGLVQPGGSLRLSCAASGFTFSAYSMIWVRQAPGKGLEWVSYIRPSGGRTTYADSVKGRFTISRDNSKNTLYLQMNSLRAEDTAVYYCARGGLLLVFRELKSNYFDYWGQGTLVTVSSASTKGPSVFPLAPSSKS

SEQ ID NO: 994 - protein, 108 aa, synthetic construct; identical to SEQ ID NO: 265
  REGION 1..108: note = Synthetic polypeptide

SEQ ID NO: 995 - protein, 143 aa, synthetic construct; identical to SEQ ID NO: 296
  REGION 1..143: note = Synthetic polypeptide

SEQ ID NO: 996 - protein, 108 aa, synthetic construct; identical to SEQ ID NO: 265
  REGION 1..108: note = Synthetic polypeptide

SEQ ID NO: 997 - protein, 143 aa, synthetic construct
  REGION 1..143: note = Synthetic polypeptide
EVQLLESGGGLVQPGGSLRLSCAASGFTFSAYSMIWVRQAPGKGLEWVSYIRPSGGRTTYADSVKGRFTISRDNSKNTLYLQMNSLRAEDTAVYYCARGGLLLWCRELKSNYFDYWGQGTLVTVSSASTKGPSVFPLAPSSKS

SEQ ID NO: 998 - protein, 108 aa, synthetic construct; identical to SEQ ID NO: 265
  REGION 1..108: note = Synthetic polypeptide

SEQ ID NO: 999 - protein, 143 aa, synthetic construct; identical to SEQ ID NO: 290
  REGION 1..143: note = Synthetic polypeptide

SEQ ID NO: 1000 - protein, 108 aa, synthetic construct; identical to SEQ ID NO: 265
  REGION 1..108: note = Synthetic polypeptide

SEQ ID NO: 1001 - protein, 143 aa, synthetic construct; identical to SEQ ID NO: 298
  REGION 1..143: note = Synthetic polypeptide

SEQ ID NO: 1002 - protein, 108 aa, synthetic construct; identical to SEQ ID NO: 265
  REGION 1..108: note = Synthetic polypeptide

SEQ ID NO: 1003 - protein, 143 aa, synthetic construct
  REGION 1..143: note = Synthetic polypeptide
EVQLLESGGGLVQPGGSLRLSCAASGFTFSAYSMIWVRQAPGKGLEWVSYIRPSGGRTTYADSVKGRFTISRDNSKNTLYLQMNSLRAEDTAVYYCARGGLLLWFAELKSNYFDYWGQGTLVTVSSASTKGPSVFPLAPSSKS

SEQ ID NO: 1004 - protein, 108 aa, synthetic construct; identical to SEQ ID NO: 265
  REGION 1..108: note = Synthetic polypeptide

SEQ ID NO: 1005 - protein, 143 aa, synthetic construct
  REGION 1..143: note = Synthetic polypeptide
EVQLLESGGGLVQPGGSLRLSCAASGFTFSAYSMIWVRQAPGKGLEWVSYIRPSGGRTTYADSVKGRFTISRDNSKNTLYLQMNSLRAEDTAVYYCARGGLLLWFCELKSNYFDYWGQGTLVTVSSASTKGPSVFPLAPSSKS

SEQ ID NO: 1006 - protein, 108 aa, synthetic construct; identical to SEQ ID NO: 265
  REGION 1..108: note = Synthetic polypeptide

SEQ ID NO: 1007 - protein, 143 aa, synthetic construct
  REGION 1..143: note = Synthetic polypeptide
EVQLLESGGGLVQPGGSLRLSCAASGFTFSAYSMIWVRQAPGKGLEWVSYIRPSGGRTTYADSVKGRFTISRDNSKNTLYLQMNSLRAEDTAVYYCARGGLLLWFEELKSNYFDYWGQGTLVTVSSASTKGPSVFPLAPSSKS

SEQ ID NO: 1008 - protein, 108 aa, synthetic construct; identical to SEQ ID NO: 265
  REGION 1..108: note = Synthetic polypeptide

SEQ ID NO: 1009 - protein, 143 aa, synthetic construct
  REGION 1..143: note = Synthetic polypeptide
EVQLLESGGGLVQPGGSLRLSCAASGFTFSAYSMIWVRQAPGKGLEWVSYIRPSGGRTTYADSVKGRFTISRDNSKNTLYLQMNSLRAEDTAVYYCARGGLLLWFFELKSNYFDYWGQGTLVTVSSASTKGPSVFPLAPSSKS

SEQ ID NO: 1010 - protein, 108 aa, synthetic construct; identical to SEQ ID NO: 265
  REGION 1..108: note = Synthetic polypeptide

SEQ ID NO: 1011 - protein, 143 aa, synthetic construct
  REGION 1..143: note = Synthetic polypeptide
EVQLLESGGGLVQPGGSLRLSCAASGFTFSAYSMIWVRQAPGKGLEWVSYIRPSGGRTTYADSVKGRFTISRDNSKNTLYLQMHSLRAEDTAVYYCARGGLLLWFGELKSNYFDYWGQGTLVTVSSASTKGPSVFPLAPSSKS

SEQ ID NO: 1012 - protein, 108 aa, synthetic construct; identical to SEQ ID NO: 265
  REGION 1..108: note = Synthetic polypeptide

SEQ ID NO: 1013 - protein, 143 aa, synthetic construct
  REGION 1..143: note = Synthetic polypeptide
EVQLLESGGGLVQPGGSLRLSCAASGFTFSAYSMIWVRQAPGKGLEWVSYIRPSGGRTTYADSVKGRFTISRDNSKNTLYLQMNSLRAEDTAVYYCARGGLLLWFHELKSNYFDYWGQGTLVTVSSASTKGPSVFPLAPSSKS

SEQ ID NO: 1014 - protein, 108 aa, synthetic construct; identical to SEQ ID NO: 265
  REGION 1..108: note = Synthetic polypeptide

SEQ ID NO: 1015 - protein, 143 aa, synthetic construct
  REGION 1..143: note = Synthetic polypeptide
EVQLLESGGGLVQPGGSLRLSCAASGFTFSAYSMIWVRQAPGKGLEWVSYIRPSGGRTTYADSVKGRFTISRDNSKNTLYLQMNSLRAEDTAVYYCARGGLLLWFKELKSNYFDYWGQGTLVTVSSASTKGPSVFPLAPSSKS

SEQ ID NO: 1016 - protein, 108 aa, synthetic construct; identical to SEQ ID NO: 265
  REGION 1..108: note = Synthetic polypeptide

SEQ ID NO: 1017 - protein, 143 aa, synthetic construct
  REGION 1..143: note = Synthetic polypeptide
EVQLLESGGGLVQPGGSLRLSCAASGFTFSAYSMIWVRQAPGKGLEWVSYIRPSGGRTTYADSVKGRFTISRDNSKNTLYLQMNSLRAEDTAVYYCARGGLLLWFLELKSNYFDYWGQGTLVTVSSASTKGPSVFPLAPSSKS

SEQ ID NO: 1018 - protein, 108 aa, synthetic construct; identical to SEQ ID NO: 265
  REGION 1..108: note = Synthetic polypeptide

SEQ ID NO: 1019 - protein, 143 aa, synthetic construct
  REGION 1..143: note = Synthetic polypeptide
EVQLLESGGGLVQPGGSLRLSCAASGFTFSAYSMIWVRQAPGKGLEWVSYIRPSGGRTTYADSVKGRFTISRDNSKNTLYLQMNSLRAEDTAVYYCARGGLLLWFMELKSNYFDYWGQGTLVTVSSASTKGPSVFPLAPSSKS

SEQ ID NO: 1020 - protein, 108 aa, synthetic construct; identical to SEQ ID NO: 265
  REGION 1..108: note = Synthetic polypeptide

SEQ ID NO: 1021 - protein, 143 aa, synthetic construct
  REGION 1..143: note = Synthetic polypeptide
EVQLLESGGGLVQPGGSLRLSCAASGFTFSAYSMIWVRQAPGKGLEWVSYIRPSGGRTTYADSVKGRFTISRDNSKNTLYLQMNSLRAEDTAVYYCARGGLLLWFPELKSNYFDYWGQGTLVTVSSASTKGPSVFPLAPSSKS

SEQ ID NO: 1022 - protein, 108 aa, synthetic construct; identical to SEQ ID NO: 265
  REGION 1..108: note = Synthetic polypeptide

SEQ ID NO: 1023 - protein, 143 aa, synthetic construct
  REGION 1..143: note = Synthetic polypeptide
EVQLLESGGGLVQPGGSLRLSCAASGFTFSAYSMIWVRQAPGKGLEWVSYIRPSGGRTTYADSVKGRFTISRDNSKNTLYLQMNSLRAEDTAVYYCARGGLLLWFQELKSNYFDYWGQGTLVTVSSASTKGPSVFPLAPSSKS

SEQ ID NO: 1024 - protein, 108 aa, synthetic construct; identical to SEQ ID NO: 265
  REGION 1..108: note = Synthetic polypeptide

SEQ ID NO: 1025 - protein, 143 aa, synthetic construct
  REGION 1..143: note = Synthetic polypeptide
EVQLLESGGGLVQPGGSLRLSCAASGFTFSAYSMIWVRQAPGKGLEWVSYIRPSGGRTTYADSVKGRFTISRDNSKNTLYLQMNSLRAEDTAVYYCARGGLLLWFRALKSNYFDYWGQGTLVTVSSASTKGPSVFPLAPSSKS

SEQ ID NO: 1026 - protein, 108 aa, synthetic construct; identical to SEQ ID NO: 265
  REGION 1..108: note = Synthetic polypeptide

SEQ ID NO: 1027 - protein, 143 aa, synthetic construct
  REGION 1..143: note = Synthetic polypeptide
EVQLLESGGGLVQPGGSLRLSCAASGFTFSAYSMIWVRQAPGKGLEWVSYIRPSGGRTTYADSVKGRFTISRDNSKNTLYLQMNSLRAEDTAVYYCARGGLLLWFRCLKSNYFDYWGQGTLVTVSSASTKGPSVFPLAPSSKS

SEQ ID NO: 1028 - protein, 108 aa, synthetic construct; identical to SEQ ID NO: 265
  REGION 1..108: note = Synthetic polypeptide

SEQ ID NO: 1029 - protein, 143 aa, synthetic construct; identical to SEQ ID NO: 266
  REGION 1..143: note = Synthetic polypeptide

SEQ ID NO: 1030 - protein, 108 aa, synthetic construct; identical to SEQ ID NO: 265
  REGION 1..108: note = Synthetic polypeptide

SEQ ID NO: 1031 - protein, 143 aa, synthetic construct
  REGION 1..143: note = Synthetic polypeptide
EVQLLESGGGLVQPGGSLRLSCAASGFTFSAYSMIWVRQAPGKGLEWVSYIRPSGGRTTYADSVKGRFTISRDNSKNTLYLQMNSLRAEDTAVYYCARGGLLLWFRGLKSNYFDYWGQGTLVTVSSASTKGPSVFPLAPSSKS

SEQ ID NO: 1032 - protein, 108 aa, synthetic construct; identical to SEQ ID NO: 265
  REGION 1..108: note = Synthetic polypeptide

SEQ ID NO: 1033 - protein, 143 aa, synthetic construct
  REGION 1..143: note = Synthetic polypeptide
EVQLLESGGGLVQPGGSLRLSCAASGFTFSAYSMIWVRQAPGKGLEWVSYIRPSGGRTTYADSVKGRFTISRDNSKNTLYLQMNSLRAEDTAVYYCARGGLLLWFRHLKSNYFDYWGQGTLVTVSSASTKGPSVFPLAPSSKS

SEQ ID NO: 1034 - protein, 108 aa, synthetic construct; identical to SEQ ID NO: 265
  REGION 1..108: note = Synthetic polypeptide

SEQ ID NO: 1035 - protein, 143 aa, synthetic construct
  REGION 1..143: note = Synthetic polypeptide
EVQLLESGGGLVQPGGSLRLSCAASGFTFSAYSMIWVRQAPGKGLEWVSYIRPSGGRTTYADSVKGRFTISRDNSKNTLYLQMNSLRAEDTAVYYCARGGLLLWFRKLKSNYFDYWGQGTLVTVSSASTKGPSVFPLAPSSKS

SEQ ID NO: 1036 - protein, 108 aa, synthetic construct; identical to SEQ ID NO: 265
  REGION 1..108: note = Synthetic polypeptide

SEQ ID NO: 1037 - protein, 143 aa, synthetic construct
  REGION 1..143: note = Synthetic polypeptide
EVQLLESGGGLVQPGGSLRLSCAASGFTFSAYSMIWVRQAPGKGLEWVSYIRPSGGRTTYADSVKGRFTISRDNSKNTLYLQMNSLRAEDTAVYYCARGGLLLWFRLLKSNYFDYWGQGTLVTVSSASTKGPSVFPLAPSSKS

SEQ ID NO: 1038 - protein, 108 aa, synthetic construct; identical to SEQ ID NO: 265
  REGION 1..108: note = Synthetic polypeptide

SEQ ID NO: 1039 - protein, 143 aa, synthetic construct
  REGION 1..143: note = Synthetic polypeptide
EVQLLESGGGLVQPGGSLRLSCAASGFTFSAYSMIWVRQAPGKGLEWVSYIRPSGGRTTYADSVKGRFTISRDNSKNTLYLQMNSLRAEDTAVYYCARGGLLLWFRNLKSNYFDYWGQGTLVTVSSASTKGPSVFPLAPSSKS

SEQ ID NO: 1040 - protein, 108 aa, synthetic construct; identical to SEQ ID NO: 265
  REGION 1..108: note = Synthetic polypeptide

SEQ ID NO: 1041 - protein, 143 aa, synthetic construct
  REGION 1..143: note = Synthetic polypeptide
EVQLLESGGGLVQPGGSLRLSCAASGFTFSAYSMIWVRQAPGKGLEWVSYIRPSGGRTTYADSVKGRFTISRDNSKNTLYLQMNSLRAEDTAVYYCARGGLLLWFRPLKSNYFDYWGQGTLVTVSSASTKGPSVFPLAPSSKS

SEQ ID NO: 1042 - protein, 108 aa, synthetic construct; identical to SEQ ID NO: 265
  REGION 1..108: note = Synthetic polypeptide

SEQ ID NO: 1043 - protein, 143 aa, synthetic construct
  REGION 1..143: note = Synthetic polypeptide
EVQLLESGGGLVQPGGSLRLSCAASGFTFSAYSMIWVRQAPGKGLEWVSYIRPSGGRTTYADSVKGRFTISRDNSKNTLYLQMNSLRAEDTAVYYCARGGLLLWFRQLKSNYFDYWGQGTLVTVSSASTKGPSVFPLAPSSKS

SEQ ID NO: 1044 - protein, 108 aa, synthetic construct; identical to SEQ ID NO: 265
  REGION 1..108: note = Synthetic polypeptide

SEQ ID NO: 1045 - protein, 143 aa, synthetic construct
  REGION 1..143: note = Synthetic polypeptide
EVQLLESGGGLVQPGGSLRLSCAASGFTFSAYSMIWVRQAPGKGLEWVSYIRPSGGRTTYADSVKGRFTISRDNSKNTLYLQMNSLRAEDTAVYYCARGGLLLWFRRLKSNYFDYWGQGTLVTVSSASTKGPSVFPLAPSSKS

SEQ ID NO: 1046 - protein, 108 aa, synthetic construct; identical to SEQ ID NO: 265
  REGION 1..108: note = Synthetic polypeptide

SEQ ID NO: 1047 - protein, 143 aa, synthetic construct
  REGION 1..143: note = Synthetic polypeptide
EVQLLESGGGLVQPGGSLRLSCAASGFTFSAYSMIWVRQAPGKGLEWVSYIRPSGGRTTYADSVKGRFTISRDNSKNTLYLQMNSLRAEDTAVYYCARGGLLLWFRSLKSNYFDYWGQGTLVTVSSASTKGPSVFPLAPSSKS

SEQ ID NO: 1048 - protein, 108 aa, synthetic construct; identical to SEQ ID NO: 265
  REGION 1..108: note = Synthetic polypeptide

SEQ ID NO: 1049 - protein, 143 aa, synthetic construct
  REGION 1..143: note = Synthetic polypeptide
EVQLLESGGGLVQPGGSLRLSCAASGFTFSAYSMIWVRQAPGKGLEWVSYIRPSGGRTTYADSVKGRFTISRDNSKNTLYLQMNSLRAEDTAVYYCARGGLLLWFRTLKSNYFDYWGQGTLVTVSSASTKGPSVFPLAPSSKS

SEQ ID NO: 1050 - protein, 108 aa, synthetic construct; identical to SEQ ID NO: 265
  REGION 1..108: note = Synthetic polypeptide

SEQ ID NO: 1051 - protein, 143 aa, synthetic construct
  REGION 1..143: note = Synthetic polypeptide
EVQLLESGGGLVQPGGSLRLSCAASGFTFSAYSMIWVRQAPGKGLEWVSYIRPSGGRTTYADSVKGRFTISRDNSKNTLYLQMNSLRAEDTAVYYCARGGLLLWFRVLKSNYFDYWGQGTLVTVSSASTKGPSVFPLAPSSKS

SEQ ID NO: 1052 - protein, 108 aa, synthetic construct; identical to SEQ ID NO: 265
  REGION 1..108: note = Synthetic polypeptide

SEQ ID NO: 1053 - protein, 143 aa, synthetic construct
  REGION 1..143: note = Synthetic polypeptide
EVQLLESGGGLVQPGGSLRLSCAASGFTFSAYSMIWVRQAPGKGLEWVSYIRPSGGRTTYADSVKGRFTISRDNSKNTLYLQMNSLRAEDTAVYYCARGGLLLWFRWLKSNYFDYWGQGTLVTVSSASTKGPSVFPLAPSSKS

SEQ ID NO: 1054 - protein, 108 aa, synthetic construct; identical to SEQ ID NO: 265
  REGION 1..108: note = Synthetic polypeptide

SEQ ID NO: 1055 - protein, 143 aa, synthetic construct
  REGION 1..143: note = Synthetic polypeptide
EVQLLESGGGLVQPGGSLRLSCAASGFTFSAYSMIWVRQAPGKGLEWVSYIRPSGGRTTYADSVKGRFTISRDNSKNTLYLQMNSLRAEDTAVYYCARGGLLLWFRYLKSNYFDYWGQGTLVTVSSASTKGPSVFPLAPSSKS

SEQ ID NO: 1056 - protein, 108 aa, synthetic construct; identical to SEQ ID NO: 265
  REGION 1..108: note = Synthetic polypeptide

SEQ ID NO: 1057 - protein, 143 aa, synthetic construct
  REGION 1..143: note = Synthetic polypeptide
EVQLLESGGGLVQPGGSLRLSCAASGFTFSAYSMIWVRQAPGKGLEWVSYIRPSGGRTTYADSVKGRFTISRDNSKNTLYLQMNSLRAEDTAVYYCARGGLLLWFSELKSNYFDYWGQGTLVTVSSASTKGPSVFPLAPSSKS

SEQ ID NO: 1058 - protein, 108 aa, synthetic construct; identical to SEQ ID NO: 265
  REGION 1..108: note = Synthetic polypeptide

SEQ ID NO: 1059 - protein, 143 aa, synthetic construct
  REGION 1..143: note = Synthetic polypeptide
EVQLLESGGGLVQPGGSLRLSCAASGFTFSAYSMIWVRQAPGKGLEWVSYIRPSGGRTTYADSVKGRFTISRDNSKNTLYLQMNSLRAEDTAVYYCARGGLLLWFTELKSNYFDYWGQGTLVTVSSASTKGPSVFPLAPSSKS

SEQ ID NO: 1060 - protein, 108 aa, synthetic construct; identical to SEQ ID NO: 265
  REGION 1..108: note = Synthetic polypeptide

SEQ ID NO: 1061 - protein, 143 aa, synthetic construct
  REGION 1..143: note = Synthetic polypeptide
EVQLLESGGGLVQPGGSLRLSCAASGFTFSAYSMIWVRQAPGKGLEWVSYIRPSGGRTTYADSVKGRFTISRDNSKNTLYLQMNSLRAEDTAVYYCARGGLLLWFVELKSNYFDYWGQGTLVTVSSASTKGPSVFPLAPSSKS

SEQ ID NO: 1062 - protein, 108 aa, synthetic construct; identical to SEQ ID NO: 265
  REGION 1..108: note = Synthetic polypeptide

SEQ ID NO: 1063 - protein, 143 aa, synthetic construct
  REGION 1..143: note = Synthetic polypeptide
EVQLLESGGGLVQPGGSLRLSCAASGFTFSAYSMIWVRQAPGKGLEWVSYIRPSGGRTTYADSVKGRFTISRDNSKNTLYLQMNSLRAEDTAVYYCARGGLLLWFWELKSNYFDYWGQGTLVTVSSASTKGPSVFPLAPSSKS

SEQ ID NO: 1064 - protein, 108 aa, synthetic construct; identical to SEQ ID NO: 265
  REGION 1..108: note = Synthetic polypeptide

SEQ ID NO: 1065 - protein, 143 aa, synthetic construct
  REGION 1..143: note = Synthetic polypeptide
EVQLLESGGGLVQPGGSLRLSCAASGFTFSAYSMIWVRQAPGKGLEWVSYIRPSGGRTTYADSVKGRFTISRDNSKNTLYLQMNSLRAEDTAVYYCARGGLLLWFYELKSNYFDYWGQGTLVTVSSASTKGPSVFPLAPSSKS

SEQ ID NO: 1066 - protein, 108 aa, synthetic construct; identical to SEQ ID NO: 265
  REGION 1..108: note = Synthetic polypeptide

SEQ ID NO: 1067 - protein, 143 aa, synthetic construct; identical to SEQ ID NO: 286
  REGION 1..143: note = Synthetic polypeptide

SEQ ID NO: 1068 - protein, 108 aa, synthetic construct; identical to SEQ ID NO: 265
  REGION 1..108: note = Synthetic polypeptide

SEQ ID NO: 1069 - protein, 143 aa, synthetic construct
  REGION 1..143: note = Synthetic polypeptide
EVQLLESGGGLVQPGGSLRLSCAASGFTFSAYSMIWVRQAPGKGLEWVSYIRPSGGRTTYADSVKGRFTISRDNSKNTLYLQMNSLRAEDTAVYYCARGGLLLWKRELKSNYFDYWGQGTLVTVSSASTKGPSVFPLAPSSKS

SEQ ID NO: 1070 - protein, 108 aa, synthetic construct; identical to SEQ ID NO: 265
  REGION 1..108: note = Synthetic polypeptide

SEQ ID NO: 1071 - protein, 143 aa, synthetic construct
  REGION 1..143: note = Synthetic polypeptide
EVQLLESGGGLVQPGGSLRLSCAASGFTFSAYSMIWVRQAPGKGLEWVSYIRPSGGRTTYADSVKGRFTISRDNSKNTLYLQMNSLRAEDTAVYYCARGGLLLWLRELKSNYFDYWGQGTLVTVSSASTKGPSVFPLAPSSKS

SEQ ID NO: 1072 - protein, 108 aa, synthetic construct; identical to SEQ ID NO: 265
  REGION 1..108: note = Synthetic polypeptide

SEQ ID NO: 1073 - protein, 143 aa, synthetic construct; identical to SEQ ID NO: 284
  REGION 1..143: note = Synthetic polypeptide

SEQ ID NO: 1074 - protein, 108 aa, synthetic construct; identical to SEQ ID NO: 265
  REGION 1..108: note = Synthetic polypeptide

SEQ ID NO: 1075 - protein, 143 aa, synthetic construct; identical to SEQ ID NO: 288
  REGION 1..143: note = Synthetic polypeptide

SEQ ID NO: 1076 - protein, 108 aa, synthetic construct; identical to SEQ ID NO: 265
  REGION 1..108: note = Synthetic polypeptide

SEQ ID NO: 1077 - protein, 143 aa, synthetic construct
  REGION 1..143: note = Synthetic polypeptide
EVQLLESGGGLVQPGGSLRLSCAASGFTFSAYSMIWVRQAPGKGLEWVSYIRPSGGRTTYADSVKGRFTISRDNSKNTLYLQMNSLRAEDTAVYYCARGGLLLWPRELKSNYFDYWGQGTLVTVSSASTKGPSVFPLAPSSKS

SEQ ID NO: 1078 - protein, 108 aa, synthetic construct; identical to SEQ ID NO: 265
  REGION 1..108: note = Synthetic polypeptide

SEQ ID NO: 1079 - protein, 143 aa, synthetic construct; identical to SEQ ID NO: 292
  REGION 1..143: note = Synthetic polypeptide

SEQ ID NO: 1080 - protein, 108 aa, synthetic construct; identical to SEQ ID NO: 265
  REGION 1..108: note = Synthetic polypeptide

SEQ ID NO: 1081 - protein, 143 aa, synthetic construct
  REGION 1..143: note = Synthetic polypeptide
EVQLLESGGGLVQPGGSLRLSCAASGFTFSAYSMIWVRQAPGKGLEWVSYIRPSGGRTTYADSVKGRFTISRDNSKNTLYLQMNSLRAEDTAVYYCARGGLLLWRRELKSNYFDYWGQGTLVTVSSASTKGPSVFPLAPSSKS

SEQ ID NO: 1082 - protein, 108 aa, synthetic construct; identical to SEQ ID NO: 265
  REGION 1..108: note = Synthetic polypeptide

SEQ ID NO: 1083 - protein, 143 aa, synthetic construct; identical to SEQ ID NO: 282
  REGION 1..143: note = Synthetic polypeptide

SEQ ID NO: 1084 - protein, 108 aa, synthetic construct; identical to SEQ ID NO: 265
  REGION 1..108: note = Synthetic polypeptide

SEQ ID NO: 1085 - protein, 143 aa, synthetic construct; identical to SEQ ID NO: 294
  REGION 1..143: note = Synthetic polypeptide

SEQ ID NO: 1086 - protein, 108 aa, synthetic construct; identical to SEQ ID NO: 265
  REGION 1..108: note = Synthetic polypeptide

SEQ ID NO: 1087 - protein, 143 aa, synthetic construct
  REGION 1..143: note = Synthetic polypeptide
EVQLLESGGGLVQPGGSLRLSCAASGFTFSAYSMIWVRQAPGKGLEWVSYIRPSGGRTTYADSVKGRFTISRDNSKNTLYLQMNSLRAEDTAVYYCARGGLLLWWRELKSNYFDYWGQGTLVTVSSASTKGPSVFPLAPSSKS

SEQ ID NO: 1088 - protein, 108 aa, synthetic construct; identical to SEQ ID NO: 265
  REGION 1..108: note = Synthetic polypeptide

SEQ ID NO: 1089 - protein, 143 aa, synthetic construct
  REGION 1..143: note = Synthetic polypeptide
EVQLLESGGGLVQPGGSLRLSCAASGFTFSAYSMIWVRQAPGKGLEWVSYIRPSGGRTTYADSVKGRFTISRDNSKNTLYLQMNSLRAEDTAVYYCARGGLLLWYRELKSNYFDYWGQGTLVTVSSASTKGPSVFPLAPSSKS

SEQ ID NO: 1090 - protein, 11 aa, synthetic construct
  REGION 1..11: note = Synthetic peptide
RASQPIDNYLN

SEQ ID NO: 1091 - protein, 7 aa, synthetic construct
  REGION 1..7: note = Synthetic peptide
AASRLQS

SEQ ID NO: 1092 - protein, 9 aa, synthetic construct
  REGION 1..9: note = Synthetic peptide
QQSYTVPYT

SEQ ID NO: 1093 - protein, 5 aa, synthetic construct
  REGION 1..5: note = Synthetic peptide
AYSMI

SEQ ID NO: 1094 - protein, 17 aa, synthetic construct
  REGION 1..17: note = Synthetic peptide
YIRPSGGRTTYADSVKG

SEQ ID NO: 1095 - protein, 17 aa, synthetic construct
  REGION 1..17: note = Synthetic peptide
GGLLLWNRELKSNYFDY

SEQ ID NO: 1096 - protein, 11 aa, synthetic construct
  REGION 1..11: note = Synthetic peptide
RASQPIDNYLN

SEQ ID NO: 1097 - protein, 7 aa, synthetic construct
  REGION 1..7: note = Synthetic peptide
AASRLQS

SEQ ID NO: 1098 - protein, 9 aa, synthetic construct
  REGION 1..9: note = Synthetic peptide
QQSYTVPYT

SEQ ID NO: 1099 - protein, 5 aa, synthetic construct
  REGION 1..5: note = Synthetic peptide
AYSMI

SEQ ID NO: 1100 - protein, 17 aa, synthetic construct
  REGION 1..17: note = Synthetic peptide
YIRPSGGRTTYADSVKG

SEQ ID NO: 1101 - protein, 17 aa, synthetic construct
  REGION 1..17: note = Synthetic peptide
GGLLLWARELKSNYFDY

SEQ ID NO: 1102 - protein, 11 aa, synthetic construct
  REGION 1..11: note = Synthetic peptide
RAGRSISTYVN

SEQ ID NO: 1103 - protein, 7 aa, synthetic construct
  REGION 1..7: note = Synthetic peptide
AASSLQS

SEQ ID NO: 1104 - protein, 9 aa, synthetic construct
  REGION 1..9: note = Synthetic peptide
QQSQSTPYT

SEQ ID NO: 1105 - protein, 5 aa, synthetic construct
  REGION 1..5: note = Synthetic peptide
HYLMT

SEQ ID NO: 1106 - protein, 17 aa, synthetic construct
  REGION 1..17: note = Synthetic peptide
YISPSGGHTIYADSVKG

SEQ ID NO: 1107 - protein, 16 aa, synthetic construct
  REGION 1..16: note = Synthetic peptide
VARGIAARSRTSYFDY

SEQ ID NO: 1108 - protein, 12 aa, synthetic construct
  REGION 1..12: note = Synthetic peptide
RASQIVSSRYLA

SEQ ID NO: 1109 - protein, 7 aa, synthetic construct
  REGION 1..7: note = Synthetic peptide
GAASRAT

SEQ ID NO: 1110 - protein, 9 aa, synthetic construct
  REGION 1..9: note = Synthetic peptide
QQTYSSPFT

SEQ ID NO: 1111 - protein, 5 aa, synthetic construct
  REGION 1..5: note = Synthetic peptide
HYLMT

SEQ ID NO: 1112 - protein, 17 aa, synthetic construct
  REGION 1..17: note = Synthetic peptide
YISPSGGHTIYADSVKG

SEQ ID NO: 1113 - protein, 16 aa, synthetic construct
  REGION 1..16: note = Synthetic peptide
VARGIAARSRTSYFDY

SEQ ID NO: 1114 - protein, 11 aa, synthetic construct
  REGION 1..11: note = Synthetic peptide
RASQSISNYLN

SEQ ID NO: 1115 - protein, 7 aa, synthetic construct
  REGION 1..7: note = Synthetic peptide
AASSLQS

SEQ ID NO: 1116 - protein, 9 aa, synthetic construct
  REGION 1..9: note = Synthetic peptide
QQSYTSPYT

SEQ ID NO: 1117 - protein, 5 aa, synthetic construct
  REGION 1..5: note = Synthetic peptide
HYLMT

SEQ ID NO: 1118 - protein, 17 aa, synthetic construct
  REGION 1..17: note = Synthetic peptide
YISPSGGHTIYADSVKG

SEQ ID NO: 1119 - protein, 16 aa, synthetic construct
  REGION 1..16: note = Synthetic peptide
VARGIAARSRTSYFDY

SEQ ID NO: 1120 - protein, 12 aa, synthetic construct
  REGION 1..12: note = Synthetic peptide
RASQIVSSNYLA

SEQ ID NO: 1121 - protein, 7 aa, synthetic construct
  REGION 1..7: note = Synthetic peptide
GASNRAT

SEQ ID NO: 1122 - protein, 9 aa, synthetic construct
  REGION 1..9: note = Synthetic peptide
QQSFNIPYT

SEQ ID NO: 1123 - protein, 5 aa, synthetic construct
  REGION 1..5: note = Synthetic peptide
HYLMT

SEQ ID NO: 1124 - protein, 17 aa, synthetic construct
  REGION 1..17: note = Synthetic peptide
YISPSGGHTIYADSVKG

SEQ ID NO: 1125 - protein, 16 aa, synthetic construct
  REGION 1..16: note = Synthetic peptide
VARGIAARSRTSYFDY

SEQ ID NO: 1126 - protein, 12 aa, synthetic construct
  REGION 1..12: note = Synthetic peptide
RTSQFVNSNYLA

SEQ ID NO: 1127 - protein, 7 aa, synthetic construct
  REGION 1..7: note = Synthetic peptide
GASSRAT

SEQ ID NO: 1128 - protein, 9 aa, synthetic construct
  REGION 1..9: note = Synthetic peptide
QQSSRTPWT

SEQ ID NO: 1129 - protein, 5 aa, synthetic construct
  REGION 1..5: note = Synthetic peptide
HYLMT

SEQ ID NO: 1130 - protein, 17 aa, synthetic construct
  REGION 1..17: note = Synthetic peptide
YISPSGGHTIYADSVKG

SEQ ID NO: 1131 - protein, 16 aa, synthetic construct
  REGION 1..16: note = Synthetic peptide
VARGIAARSRTSYFDY

SEQ ID NO: 1132 - protein, 12 aa, synthetic construct
  REGION 1..12: note = Synthetic peptide
RTSQFVNSNYLA

SEQ ID NO: 1133 - protein, 7 aa, synthetic construct
  REGION 1..7: note = Synthetic peptide
GASSRAT

SEQ ID NO: 1134 - protein, 9 aa, synthetic construct
  REGION 1..9: note = Synthetic peptide
QQSSRTPWT

SEQ ID NO: 1135 - protein, 5 aa, synthetic construct
  REGION 1..5: note = Synthetic peptide
HYLMT

SEQ ID NO: 1136 - protein, 17 aa, synthetic construct
  REGION 1..17: note = Synthetic peptide
YISPSGGHTIYADSVKG

SEQ ID NO: 1137 - protein, 16 aa, synthetic construct
  REGION 1..16: note = Synthetic peptide
VARGIAARSRTSYFDY

SEQ ID NO: 1138 - protein, 108 aa, synthetic construct
  REGION 1..108: note = Synthetic polypeptide
QDIQMTQSPSSLSASVGDRVTVTCRAGRSISTYVNWYQQKPGKAPKLLIYAASSLQSGVPSRFSGSRSGTDFTLTISSLQPEDFATYYCQQSQSTPYTFGQGTKLEVK

SEQ ID NO: 1139 - protein, 142 aa, synthetic construct; identical to SEQ ID NO: 276
  REGION 1..142: note = Synthetic polypeptide

SEQ ID NO: 1140 - protein, 109 aa, synthetic construct
  REGION 1..109: note = Synthetic polypeptide
QDIQMTQSPGTLSLSPGERATLSCRASQIVSSRYLAWYQQRPGQAPRLLIYGAASRATGIPDRFSGSGSGTDFTLTISSLQAEDFATYYCQQTYSSPFTFGQGTKMEIK

SEQ ID NO: 1141 - protein, 142 aa, synthetic construct; identical to SEQ ID NO: 276
  REGION 1..142: note = Synthetic polypeptide

SEQ ID NO: 1142 - protein, 109 aa, synthetic construct
  REGION 1..109: note = Synthetic polypeptide
QDIQMTQSPGTLSLSPGERATLSCRTSQFVNSNYLAWYQQTPGQAPRLLIYGASSRATGIPDRFSGTGYGTDFTLTISRLEPEDYGTYYCQQSSRTPWTFGQGTRVEIK

SEQ ID NO: 1143 - protein, 142 aa, synthetic construct; identical to SEQ ID NO: 276
  REGION 1..142: note = Synthetic polypeptide

SEQ ID NO: 1144 - protein, 110 aa, synthetic construct
  REGION 1..110: note = Synthetic polypeptide
QDIQMTQSPDSLSASVGDRVTITCRASQSISNYLNWYQQKPGKAPKLLIYAASSLQSGVPSRFSGSGSGTDFTLTISGLQPEDFASYYCQQSYTSPYTFVQGTKLEIKRT

SEQ ID NO: 1145 - protein, 142 aa, synthetic construct; identical to SEQ ID NO: 276
  REGION 1..142: note = Synthetic polypeptide

SEQ ID NO: 1146 - protein, 109 aa, synthetic construct
  REGION 1..109: note = Synthetic polypeptide
QDIQMTQSPATLSLSPGERATLSCRASQIVSSNYLAWYQQKPGQAPRLLIYGASNRATGIPDRFSGSGSGTEFTLTISSLQSEDFAIYYCQQSFNIPYTFGQGTRVDIK

SEQ ID NO: 1147 - protein, 142 aa, synthetic construct; identical to SEQ ID NO: 276
  REGION 1..142: note = Synthetic polypeptide

SEQ ID NO: 1148 - protein, 11 aa, synthetic construct
  REGION 1..11: note = Synthetic peptide
RASQSISSWLA

SEQ ID NO: 1149 - protein, 7 aa, synthetic construct
  REGION 1..7: note = Synthetic peptide
KASTLES

SEQ ID NO: 1150 - protein, 8 aa, synthetic construct
  REGION 1..8: note = Synthetic peptide
QQYNTYWT

SEQ ID NO: 1151 - protein, 5 aa, synthetic construct
  REGION 1..5: note = Synthetic peptide
HYIMM

SEQ ID NO: 1152 - protein, 17 aa, synthetic construct
  REGION 1..17: note = Synthetic peptide
GIYSSGGITVYADSVKG

SEQ ID NO: 1153 - protein, 13 aa, synthetic construct
  REGION 1..13: note = Synthetic peptide
QRTGVPRRDSFNI

SEQ ID NO: 1154 - protein, 11 aa, synthetic construct
  REGION 1..11: note = Synthetic peptide
RASQSISSWLA

SEQ ID NO: 1155 - protein, 7 aa, synthetic construct
  REGION 1..7: note = Synthetic peptide
KASTLES

SEQ ID NO: 1156 - protein, 8 aa, synthetic construct
  REGION 1..8: note = Synthetic peptide
QQYNTYWT

SEQ ID NO: 1157 - protein, 5 aa, synthetic construct
  REGION 1..5: note = Synthetic peptide
IYSMH

SEQ ID NO: 1158 - protein, 17 aa, synthetic construct
  REGION 1..17: note = Synthetic peptide
SIYPSRGMTWYADSVKG

SEQ ID NO: 1159 - protein, 13 aa, synthetic construct
  REGION 1..13: note = Synthetic peptide
RRTGIPRRDAFDI

SEQ ID NO: 1160 - protein, 11 aa, synthetic construct
  REGION 1..11: note = Synthetic peptide
RASQSISSWLA

SEQ ID NO: 1161 - protein, 7 aa, synthetic construct
  REGION 1..7: note = Synthetic peptide
KASTLES

SEQ ID NO: 1162 - protein, 8 aa, synthetic construct
  REGION 1..8: note = Synthetic peptide
QQYNTYWT

SEQ ID NO: 1163 - protein, 5 aa, synthetic construct
  REGION 1..5: note = Synthetic peptide
VYNMH

SEQ ID NO: 1164 - protein, 17 aa, synthetic construct
  REGION 1..17: note = Synthetic peptide
SIYPSGGMTYYADSVKG

SEQ ID NO: 1165 - protein, 13 aa, synthetic construct
  REGION 1..13: note = Synthetic peptide
RRTGIPRRDAFDI

SEQ ID NO: 1166 - protein, 11 aa, synthetic construct
  REGION 1..11: note = Synthetic peptide
RASQSISSWLA

SEQ ID NO: 1167 - protein, 7 aa, synthetic construct
  REGION 1..7: note = Synthetic peptide
KASTLES

SEQ ID NO: 1168 - protein, 8 aa, synthetic construct
  REGION 1..8: note = Synthetic peptide
QQYNTYWT

SEQ ID NO: 1169 - protein, 5 aa, synthetic construct
  REGION 1..5: note = Synthetic peptide
HYIMM

SEQ ID NO: 1170 - protein, 17 aa, synthetic construct
  REGION 1..17: note = Synthetic peptide
GIYSSGGITVYADSVKG

SEQ ID NO: 1171 - protein, 13 aa, synthetic construct
  REGION 1..13: note = Synthetic peptide
RRIGVPRRDEFDI

SEQ ID NO: 1172 - protein, 11 aa, synthetic construct
  REGION 1..11: note = Synthetic peptide
RASQSISSWLA

SEQ ID NO: 1173 - protein, 7 aa, synthetic construct
  REGION 1..7: note = Synthetic peptide
KASTLES

SEQ ID NO: 1174 - protein, 8 aa, synthetic construct
  REGION 1..8: note = Synthetic peptide
QQYNTYWT

SEQ ID NO: 1175 - protein, 5 aa, synthetic construct
  REGION 1..5: note = Synthetic peptide
HYIMM

SEQ ID NO: 1176 - protein, 17 aa, synthetic construct
  REGION 1..17: note = Synthetic peptide
GIYSSGGITVYADSVKG

SEQ ID NO: 1177 - protein, 13 aa, synthetic construct
  REGION 1..13: note = Synthetic peptide
RRTGVPRWDDFDI

SEQ ID NO: 1178 - protein, 11 aa, synthetic construct
  REGION 1..11: note = Synthetic peptide
RASQSISSWLA

SEQ ID NO: 1179 - protein, 7 aa, synthetic construct
  REGION 1..7: note = Synthetic peptide
KASTLES

SEQ ID NO: 1180 - protein, 8 aa, synthetic construct
  REGION 1..8: note = Synthetic peptide
QQYNTYWT

SEQ ID NO: 1181 - protein, 5 aa, synthetic construct
  REGION 1..5: note = Synthetic peptide
IYSMH

SEQ ID NO: 1182 - protein, 17 aa, synthetic construct
  REGION 1..17: note = Synthetic peptide
SIYSSGGPTKYADSVKG

SEQ ID NO: 1183 - protein, 13 aa, synthetic construct
  REGION 1..13: note = Synthetic peptide
RRTGIPRRDAFDI

SEQ ID NO: 1184 - protein, 11 aa, synthetic construct
  REGION 1..11: note = Synthetic peptide
RASQSISSWLA

SEQ ID NO: 1185 - protein, 7 aa, synthetic construct
  REGION 1..7: note = Synthetic peptide
KASTLES

SEQ ID NO: 1186 - protein, 8 aa, synthetic construct
  REGION 1..8: note = Synthetic peptide
QQYNTYWT

SEQ ID NO: 1187 - protein, 5 aa, synthetic construct
  REGION 1..5: note = Synthetic peptide
HYIMM

SEQ ID NO: 1188 - protein, 17 aa, synthetic construct
  REGION 1..17: note = Synthetic peptide
GIYSSGGITVYADSVKG

SEQ ID NO: 1189 - protein, 13 aa, synthetic construct
  REGION 1..13: note = Synthetic peptide
RRIGVPRRDSFDM

SEQ ID NO: 1190 - protein, 11 aa, synthetic construct
  REGION 1..11: note = Synthetic peptide
RASQSISSWLA

SEQ ID NO: 1191 - protein, 7 aa, synthetic construct
  REGION 1..7: note = Synthetic peptide
KASTLES

SEQ ID NO: 1192 - protein, 8 aa, synthetic construct
  REGION 1..8: note = Synthetic peptide
QQYNTYWT

SEQ ID NO: 1193 - protein, 5 aa, synthetic construct
  REGION 1..5: note = Synthetic peptide
HYIMM

SEQ ID NO: 1194 - protein, 17 aa, synthetic construct
  REGION 1..17: note = Synthetic peptide
GIYSSGGITVYADSVKG

SEQ ID NO: 1195 - protein, 13 aa, synthetic construct
  REGION 1..13: note = Synthetic peptide
RRTGVPRWDDFDI

SEQ ID NO: 1196 - protein, 11 aa, synthetic construct
  REGION 1..11: note = Synthetic peptide
RASQSISSWLA

SEQ ID NO: 1197 - protein, 7 aa, synthetic construct
  REGION 1..7: note = Synthetic peptide
KASTLES

SEQ ID NO: 1198 - protein, 8 aa, synthetic construct
  REGION 1..8: note = Synthetic peptide
QQYNTYWT

SEQ ID NO: 1199 - protein, 5 aa, synthetic construct
  REGION 1..5: note = Synthetic peptide
HYIMM

SEQ ID NO: 1200 - protein, 17 aa, synthetic construct
  REGION 1..17: note = Synthetic peptide
GIYSSGGITVYADSVKG

SEQ ID NO: 1201 - protein, 13 aa, synthetic construct
  REGION 1..13: note = Synthetic peptide
RRTGVPRRDEFDI

SEQ ID NO: 1202 - protein, 11 aa, synthetic construct
  REGION 1..11: note = Synthetic peptide
RASQSISSWLA

SEQ ID NO: 1203 - protein, 7 aa, synthetic construct
  REGION 1..7: note = Synthetic peptide
KASTLES

SEQ ID NO: 1204 - protein, 8 aa, synthetic construct
  REGION 1..8: note = Synthetic peptide
QQYNTYWT

SEQ ID NO: 1205 - protein, 5 aa, synthetic construct
  REGION 1..5: note = Synthetic peptide
IYDMI

SEQ ID NO: 1206 - protein, 17 aa, synthetic construct
  REGION 1..17: note = Synthetic peptide
SIYPSGGNTSYADSVKG

SEQ ID NO: 1207 - protein, 13 aa, synthetic construct
  REGION 1..13: note = Synthetic peptide
RRTGIPRRDAFDI

SEQ ID NO: 1208 - protein, 11 aa, synthetic construct
  REGION 1..11: note = Synthetic peptide
RASQSISSWLA

SEQ ID NO: 1209 - protein, 7 aa, synthetic construct
  REGION 1..7: note = Synthetic peptide
KASTLES

SEQ ID NO: 1210 - protein, 8 aa, synthetic construct
  REGION 1..8: note = Synthetic peptide
QQYNTYWT

SEQ ID NO: 1211 - protein, 5 aa, synthetic construct
  REGION 1..5: note = Synthetic peptide
HYIMM

SEQ ID NO: 1212 - protein, 17 aa, synthetic construct
  REGION 1..17: note = Synthetic peptide
GIYSSGGITVYADSVKG

SEQ ID NO: 1213 - protein, 13 aa, synthetic construct
  REGION 1..13: note = Synthetic peptide
RRIGVPRRDSFDI

SEQ ID NO: 1214 - protein, 11 aa, synthetic construct
  REGION 1..11: note = Synthetic peptide
RASQSISSWLA

SEQ ID NO: 1215 - protein, 7 aa, synthetic construct
  REGION 1..7: note = Synthetic peptide
KASTLES

SEQ ID NO: 1216 - protein, 8 aa, synthetic construct
  REGION 1..8: note = Synthetic peptide
QQYNTYWT

SEQ ID NO: 1217 - protein, 5 aa, synthetic construct
  REGION 1..5: note = Synthetic peptide
VYNMH

SEQ ID NO: 1218 - protein, 17 aa, synthetic construct
  REGION 1..17: note = Synthetic peptide
SIYPSGGMTTYADSVKG

SEQ ID NO: 1219 - protein, 13 aa, synthetic construct
  REGION 1..13: note = Synthetic peptide
RRTGIPRRDAFDI

SEQ ID NO: 1220 - protein, 11 aa, synthetic construct
  REGION 1..11: note = Synthetic peptide
RASQSISSWLA

SEQ ID NO: 1221 - protein, 7 aa, synthetic construct
  REGION 1..7: note = Synthetic peptide
KASTLES

SEQ ID NO: 1222 - protein, 8 aa, synthetic construct
  REGION 1..8: note = Synthetic peptide
QQYNTYWT

SEQ ID NO: 1223 - protein, 5 aa, synthetic construct
  REGION 1..5: note = Synthetic peptide
IYDMT

SEQ ID NO: 1224 - protein, 17 aa, synthetic construct
  REGION 1..17: note = Synthetic peptide
SIYPSGGQTIYADSVKG

SEQ ID NO: 1225 - protein, 13 aa, synthetic construct
  REGION 1..13: note = Synthetic peptide
RRTGIPRRDAFDI

SEQ ID NO: 1226 - protein, 11 aa, synthetic construct
  REGION 1..11: note = Synthetic peptide
RASQSISSWLA

SEQ ID NO: 1227 - protein, 7 aa, synthetic construct
  REGION 1..7: note = Synthetic peptide
KASTLES

SEQ ID NO: 1228 - protein, 8 aa, synthetic construct
  REGION 1..8: note = Synthetic peptide
QQYNTYWT

SEQ ID NO: 1229 - protein, 5 aa, synthetic construct
  REGION 1..5: note = Synthetic peptide
HYIMM

SEQ ID NO: 1230 - protein, 17 aa, synthetic construct
  REGION 1..17: note = Synthetic peptide
GIYSSGGITVYADSVKG

SEQ ID NO: 1231 - protein, 13 aa, synthetic construct
  REGION 1..13: note = Synthetic peptide
RRTGVPRRDSFDI

SEQ ID NO: 1232 - protein, 11 aa, synthetic construct
  REGION 1..11: note = Synthetic peptide
RASQSISSWLA

SEQ ID NO: 1233 - protein, 7 aa, synthetic construct
  REGION 1..7: note = Synthetic peptide
KASTLES

SEQ ID NO: 1234 - protein, 8 aa, synthetic construct
  REGION 1..8: note = Synthetic peptide
QQYNTYWT

SEQ ID NO: 1235 - protein, 5 aa, synthetic construct
  REGION 1..5: note = Synthetic peptide
SYNMH

SEQ ID NO: 1236 - protein, 17 aa, synthetic construct
  REGION 1..17: note = Synthetic peptide
SIVPSGGKTNYADSVKG

SEQ ID NO: 1237 - protein, 13 aa, synthetic construct
  REGION 1..13: note = Synthetic peptide
RRTGIPRRDAFDI

SEQ ID NO: 1238 - protein, 11 aa, synthetic construct
  REGION 1..11: note = Synthetic peptide
RASQSISSWLA

SEQ ID NO: 1239 - protein, 7 aa, synthetic construct
  REGION 1..7: note = Synthetic peptide
KASTLES

SEQ ID NO: 1240 - protein, 8 aa, synthetic construct
  REGION 1..8: note = Synthetic peptide
QQYNTYWT

SEQ ID NO: 1241 - protein, 5 aa, synthetic construct
  REGION 1..5: note = Synthetic peptide
RYSMR

SEQ ID NO: 1242 - protein, 17 aa, synthetic construct
  REGION 1..17: note = Synthetic peptide
VIYPSGGQTYYADSVKG

SEQ ID NO: 1243 - protein, 13 aa, synthetic construct
  REGION 1..13: note = Synthetic peptide
RRTGIPRRDAFDI

SEQ ID NO: 1244 - protein, 11 aa, synthetic construct
  REGION 1..11: note = Synthetic peptide
RASQSISSWLA

SEQ ID NO: 1245 - protein, 7 aa, synthetic construct
  REGION 1..7: note = Synthetic peptide
KASTLES

SEQ ID NO: 1246 - protein, 8 aa, synthetic construct
  REGION 1..8: note = Synthetic peptide
QQYNTYWT

SEQ ID NO: 1247 - protein, 5 aa, synthetic construct
  REGION 1..5: note = Synthetic peptide
IYSMQ

SEQ ID NO: 1248 - protein, 17 aa, synthetic construct
  REGION 1..17: note = Synthetic peptide
SIGSSGGKTLYADSVKG

SEQ ID NO: 1249 - protein, 13 aa, synthetic construct
  REGION 1..13: note = Synthetic peptide
RRTGIPRRDAFDI

SEQ ID NO: 1250 - protein, 11 aa, synthetic construct
  REGION 1..11: note = Synthetic peptide
RASQSISSWLA

SEQ ID NO: 1251 - protein, 7 aa, synthetic construct
  REGION 1..7: note = Synthetic peptide
KASTLES

SEQ ID NO: 1252 - protein, 8 aa, synthetic construct
  REGION 1..8: note = Synthetic peptide
QQYNTYWT

SEQ ID NO: 1253 - protein, 5 aa, synthetic construct
  REGION 1..5: note = Synthetic peptide
VYSMT

SEQ ID NO: 1254 - protein, 17 aa, synthetic construct
  REGION 1..17: note = Synthetic peptide
SIGSSGGSTTYADSVKG

SEQ ID NO: 1255 - protein, 13 aa, synthetic construct
  REGION 1..13: note = Synthetic peptide
RRTGIPRRDAFDI

SEQ ID NO: 1256 - protein, 11 aa, synthetic construct
  REGION 1..11: note = Synthetic peptide
RASQSISSWLA

SEQ ID NO: 1257 - protein, 7 aa, synthetic construct
  REGION 1..7: note = Synthetic peptide
KASTLES

SEQ ID NO: 1258 - protein, 8 aa, synthetic construct
  REGION 1..8: note = Synthetic peptide
QQYNTYWT

SEQ ID NO: 1259 - protein, 5 aa, synthetic construct
  REGION 1..5: note = Synthetic peptide
IYDMN

SEQ ID NO: 1260 - protein, 17 aa, synthetic construct
  REGION 1..17: note = Synthetic peptide
SIYPSGGRTRYADSVKG

SEQ ID NO: 1261 - protein, 13 aa, synthetic construct
  REGION 1..13: note = Synthetic peptide
RRTGIPRRDAFDI

SEQ ID NO: 1262 - protein, 11 aa, synthetic construct
  REGION 1..11: note = Synthetic peptide
RASQSISSWLA

SEQ ID NO: 1263 - protein, 7 aa, synthetic construct
  REGION 1..7: note = Synthetic peptide
KASTLES

SEQ ID NO: 1264 - protein, 8 aa, synthetic construct
  REGION 1..8: note = Synthetic peptide
QQYNTYWT

SEQ ID NO: 1265 - protein, 5 aa, synthetic construct
  REGION 1..5: note = Synthetic peptide
HYIMM

SEQ ID NO: 1266 - protein, 17 aa, synthetic construct
  REGION 1..17: note = Synthetic peptide
GIYSSGGITVYADSVKG

SEQ ID NO: 1267 - protein, 13 aa, synthetic construct
  REGION 1..13: note = Synthetic peptide
RRTGVPRRDDFDI

SEQ ID NO: 1268 - protein, 11 aa, synthetic construct
  REGION 1..11: note = Synthetic peptide
RASQSISSWLA

SEQ ID NO: 1269 - protein, 7 aa, synthetic construct
  REGION 1..7: note = Synthetic peptide
KASTLES

SEQ ID NO: 1270 - protein, 8 aa, synthetic construct
  REGION 1..8: note = Synthetic peptide
QQYNTYWT

SEQ ID NO: 1271 - protein, 6 aa, synthetic construct
  REGION 1..6: note = Synthetic peptide
HYMGMN

SEQ ID NO: 1272 - protein, 17 aa, synthetic construct
  REGION 1..17: note = Synthetic peptide
SIVPSGGWTQYADSVKG

SEQ ID NO: 1273 - protein, 13 aa, synthetic construct
  REGION 1..13: note = Synthetic peptide
RRTGIPRRDAFDI

SEQ ID NO: 1274 - protein, 11 aa, synthetic construct
  REGION 1..11: note = Synthetic peptide
RASQSISSWLA

SEQ ID NO: 1275 - protein, 7 aa, synthetic construct
  REGION 1..7: note = Synthetic peptide
KASTLES

SEQ ID NO: 1276 - protein, 8 aa, synthetic construct
  REGION 1..8: note = Synthetic peptide
QQYNTYWT

SEQ ID NO: 1277 - protein, 5 aa, synthetic construct
  REGION 1..5: note = Synthetic peptide
TYTMR

SEQ ID NO: 1278 - protein, 17 aa, synthetic construct
  REGION 1..17: note = Synthetic peptide
SIYPSGGKTQYADSVKG

SEQ ID NO: 1279 - protein, 13 aa, synthetic construct
  REGION 1..13: note = Synthetic peptide
RRTGIPRRDAFDI

SEQ ID NO: 1280 - protein, 11 aa, synthetic construct
  REGION 1..11: note = Synthetic peptide
RASQSISSWLA

SEQ ID NO: 1281 - protein, 7 aa, synthetic construct
  REGION 1..7: note = Synthetic peptide
KASTLES

SEQ ID NO: 1282 - protein, 8 aa, synthetic construct
  REGION 1..8: note = Synthetic peptide
QQYNTYWT

SEQ ID NO: 1283 - protein, 5 aa, synthetic construct
  REGION 1..5: note = Synthetic peptide
IYDMW

SEQ ID NO: 1284 - protein, 17 aa, synthetic construct
  REGION 1..17: note = Synthetic peptide
SIRPSGGITKYADSVKG

SEQ ID NO: 1285 - protein, 13 aa, synthetic construct
  REGION 1..13: note = Synthetic peptide
RRTGIPRRDAFDI

SEQ ID NO: 1286 - protein, 11 aa, synthetic construct
  REGION 1..11: note = Synthetic peptide
RASQSISSWLA

SEQ ID NO: 1287 - protein, 7 aa, synthetic construct
  REGION 1..7: note = Synthetic peptide
KASTLES

SEQ ID NO: 1288 - protein, 8 aa, synthetic construct
  REGION 1..8: note = Synthetic peptide
QQYNTYWT

SEQ ID NO: 1289 - protein, 5 aa, synthetic construct
  REGION 1..5: note = Synthetic peptide
IYNMI

SEQ ID NO: 1290 - protein, 17 aa, synthetic construct
  REGION 1..17: note = Synthetic peptide
SIYPSGGWTTYADSVKG

SEQ ID NO: 1291 - protein, 13 aa, synthetic construct
  REGION 1..13: note = Synthetic peptide
RRTGIPRRDAFDI

SEQ ID NO: 1292 - protein, 11 aa, synthetic construct
  REGION 1..11: note = Synthetic peptide
RASQSISSWLA

SEQ ID NO: 1293 - protein, 7 aa, synthetic construct
  REGION 1..7: note = Synthetic peptide
KASTLES

SEQ ID NO: 1294 - protein, 8 aa, synthetic construct
  REGION 1..8: note = Synthetic peptide
QQYNTYWT

SEQ ID NO: 1295 - protein, 5 aa, synthetic construct
  REGION 1..5: note = Synthetic peptide
IYHMY

SEQ ID NO: 1296 - protein, 17 aa, synthetic construct
  REGION 1..17: note = Synthetic peptide
SIGPSGGPTGYADSVKG

SEQ ID NO: 1297 - protein, 13 aa, synthetic construct
  REGION 1..13: note = Synthetic peptide
RRTGIPRRDAFDI

SEQ ID NO: 1298 - protein, 11 aa, synthetic construct
  REGION 1..11: note = Synthetic peptide
RASQSISSWLA

SEQ ID NO: 1299 - protein, 7 aa, synthetic construct
  REGION 1..7: note = Synthetic peptide
KASTLES

SEQ ID NO: 1300 - protein, 8 aa, synthetic construct
  REGION 1..8: note = Synthetic peptide
QQYNTYWT

SEQ ID NO: 1301 - protein, 5 aa, synthetic construct
  REGION 1..5: note = Synthetic peptide
TYSMY

SEQ ID NO: 1302 - protein, 17 aa, synthetic construct
  REGION 1..17: note = Synthetic peptide
SIYPSGGLTWYADSVKG

SEQ ID NO: 1303 - protein, 13 aa, synthetic construct
  REGION 1..13: note = Synthetic peptide
RRTGIPRRDAFDI

SEQ ID NO: 1304 - protein, 11 aa, synthetic construct
  REGION 1..11: note = Synthetic peptide
RASQSISSWLA

SEQ ID NO: 1305 - protein, 7 aa, synthetic construct
  REGION 1..7: note = Synthetic peptide
KASTLES

SEQ ID NO: 1306 - protein, 8 aa, synthetic construct
  REGION 1..8: note = Synthetic peptide
QQYNTYWT

SEQ ID NO: 1307 - protein, 5 aa, synthetic construct
  REGION 1..5: note = Synthetic peptide
HYIMM

SEQ ID NO: 1308 - protein, 17 aa, synthetic construct
  REGION 1..17: note = Synthetic peptide
GIYSSGGITVYADSVKG

SEQ ID NO: 1309 - protein, 13 aa, synthetic construct
  REGION 1..13: note = Synthetic peptide
RRIGVPRRDDFDI

SEQ ID NO: 1310 - protein, 11 aa, synthetic construct
  REGION 1..11: note = Synthetic peptide
RASQSISSWLA

SEQ ID NO: 1311 - protein, 7 aa, synthetic construct
  REGION 1..7: note = Synthetic peptide
KASTLES

SEQ ID NO: 1312 - protein, 8 aa, synthetic construct
  REGION 1..8: note = Synthetic peptide
QQYNTYWT

SEQ ID NO: 1313 - protein, 5 aa, synthetic construct
  REGION 1..5: note = Synthetic peptide
IYDMY

SEQ ID NO: 1314 - protein, 17 aa, synthetic construct
  REGION 1..17: note = Synthetic peptide
SIGPSGGPTAYADSVKG

SEQ ID NO: 1315 - protein, 13 aa, synthetic construct
  REGION 1..13: note = Synthetic peptide
RRTGIPRRDAFDI

SEQ ID NO: 1316 - protein, 11 aa, synthetic construct
  REGION 1..11: note = Synthetic peptide
RASQSISSWLA

SEQ ID NO: 1317 - protein, 7 aa, synthetic construct
  REGION 1..7: note = Synthetic peptide
KASTLES

SEQ ID NO: 1318 - protein, 8 aa, synthetic construct
  REGION 1..8: note = Synthetic peptide
QQYNTYWT

SEQ ID NO: 1319 - protein, 5 aa, synthetic construct
  REGION 1..5: note = Synthetic peptide
VYSMW

SEQ ID NO: 1320 - protein, 17 aa, synthetic construct
  REGION 1..17: note = Synthetic peptide
SISSSGGMTEYADSVKG

SEQ ID NO: 1321 - protein, 13 aa, synthetic construct
  REGION 1..13: note = Synthetic peptide
RRTGIPRRDAFDI

SEQ ID NO: 1322 - protein, 11 aa, synthetic construct
  REGION 1..11: note = Synthetic peptide
RASQSISSWLA

SEQ ID NO: 1323 - protein, 7 aa, synthetic construct
  REGION 1..7: note = Synthetic peptide
KASTLES

SEQ ID NO: 1324 - protein, 8 aa, synthetic construct
  REGION 1..8: note = Synthetic peptide
QQYNTYWT

SEQ ID NO: 1325 - protein, 5 aa, synthetic construct
  REGION 1..5: note = Synthetic peptide
HYIMM

SEQ ID NO: 1326 - protein, 17 aa, synthetic construct
  REGION 1..17: note = Synthetic peptide
GIYSSGGITVYADSVKG

SEQ ID NO: 1327 - protein, 13 aa, synthetic construct
  REGION 1..13: note = Synthetic peptide
RRRGVPRRDDFDI

SEQ ID NO: 1328 - protein, 11 aa, synthetic construct
  REGION 1..11: note = Synthetic peptide
RASQSISSWLA

SEQ ID NO: 1329 - protein, 7 aa, synthetic construct
  REGION 1..7: note = Synthetic peptide
KASTLES

SEQ ID NO: 1330 - protein, 8 aa, synthetic construct
  REGION 1..8: note = Synthetic peptide
QQYNTYWT

SEQ ID NO: 1331 - protein, 5 aa, synthetic construct
  REGION 1..5: note = Synthetic peptide
IYGMF

SEQ ID NO: 1332 - protein, 17 aa, synthetic construct
  REGION 1..17: note = Synthetic peptide
GIGPSGGPTKYADSVKG

SEQ ID NO: 1333 - protein, 13 aa, synthetic construct
  REGION 1..13: note = Synthetic peptide
RRTGIPRRDAFDI

SEQ ID NO: 1334 - protein, 11 aa, synthetic construct
  REGION 1..11: note = Synthetic peptide
RASQSISSWLA

SEQ ID NO: 1335 - protein, 7 aa, synthetic construct
  REGION 1..7: note = Synthetic peptide
KASTLES

SEQ ID NO: 1336 - protein, 8 aa, synthetic construct
  REGION 1..8: note = Synthetic peptide
QQYNTYWT

SEQ ID NO: 1337 - protein, 5 aa, synthetic construct
  REGION 1..5: note = Synthetic peptide
IYSMF

SEQ ID NO: 1338 - protein, 17 aa, synthetic construct
  REGION 1..17: note = Synthetic peptide
SIGPSGGVTHYADSVKG

SEQ ID NO: 1339 - protein, 13 aa, synthetic construct
  REGION 1..13: note = Synthetic peptide
RRTGIPRRDAFDI

SEQ ID NO: 1340 - protein, 11 aa, synthetic construct
  REGION 1..11: note = Synthetic peptide
RASQSISSWLA

SEQ ID NO: 1341 - protein, 7 aa, synthetic construct
  REGION 1..7: note = Synthetic peptide
KASTLES

SEQ ID NO: 1342 - protein, 8 aa, synthetic construct
  REGION 1..8: note = Synthetic peptide
QQYNTYWT

SEQ ID NO: 1343 - protein, 5 aa, synthetic construct
  REGION 1..5: note = Synthetic peptide
IYSMY

SEQ ID NO: 1344 - protein, 17 aa, synthetic construct
  REGION 1..17: note = Synthetic peptide
YIRPSGGNTKYADSVKG

SEQ ID NO: 1345 - protein, 13 aa, synthetic construct
  REGION 1..13: note = Synthetic peptide
RRTGIPRRDAFDI

SEQ ID NO: 1346 - protein, 11 aa, synthetic construct
  REGION 1..11: note = Synthetic peptide
RASQSISSWLA

SEQ ID NO: 1347 - protein, 7 aa, synthetic construct
  REGION 1..7: note = Synthetic peptide
KASTLES

SEQ ID NO: 1348 - protein, 8 aa, synthetic construct
  REGION 1..8: note = Synthetic peptide
QQYNTYWT

SEQ ID NO: 1349 - protein, 5 aa, synthetic construct
  REGION 1..5: note = Synthetic peptide
RYSMI

SEQ ID NO: 1350 - protein, 17 aa, synthetic construct
  REGION 1..17: note = Synthetic peptide
SIWSSGGATEYADSVKG

SEQ ID NO: 1351 - protein, 13 aa, synthetic construct
  REGION 1..13: note = Synthetic peptide
RRTGIPRRDAFDI

SEQ ID NO: 1352 - protein, 11 aa, synthetic construct
  REGION 1..11: note = Synthetic peptide
RASQSISSWLA

SEQ ID NO: 1353 - protein, 7 aa, synthetic construct
  REGION 1..7: note = Synthetic peptide
KASTLES

SEQ ID NO: 1354 - protein, 8 aa, synthetic construct
  REGION 1..8: note = Synthetic peptide
QQYNTYWT

SEQ ID NO: 1355 - protein, 5 aa, synthetic construct
  REGION 1..5: note = Synthetic peptide
HYIMM

SEQ ID NO: 1356 - protein, 17 aa, synthetic construct
  REGION 1..17: note = Synthetic peptide
GIYSSGGITVYADSVKG

SEQ ID NO: 1357 - protein, 13 aa, synthetic construct
  REGION 1..13: note = Synthetic peptide
RRIGVPRRDAFDI

SEQ ID NO: 1358 - protein, 11 aa, synthetic construct
  REGION 1..11: note = Synthetic peptide
RASQSISSWLA

SEQ ID NO: 1359 - protein, 7 aa, synthetic construct
  REGION 1..7: note = Synthetic peptide
KASTLES

SEQ ID NO: 1360 - protein, 8 aa, synthetic construct
  REGION 1..8: note = Synthetic peptide
QQYNTYWT

SEQ ID NO: 1361 - protein, 5 aa, synthetic construct
  REGION 1..5: note = Synthetic peptide
HYIMM

SEQ ID NO: 1362 - protein, 17 aa, synthetic construct
  REGION 1..17: note = Synthetic peptide
GIYSSGGITVYADSVKG

SEQ ID NO: 1363 - protein, 13 aa, synthetic construct
  REGION 1..13: note = Synthetic peptide
RRTGVPRRDSFEI

SEQ ID NO: 1364 - protein, 11 aa, synthetic construct
  REGION 1..11: note = Synthetic peptide
RASQSISSWLA

SEQ ID NO: 1365 - protein, 7 aa, synthetic construct
  REGION 1..7: note = Synthetic peptide
KASTLES

SEQ ID NO: 1366 - protein, 8 aa, synthetic construct
  REGION 1..8: note = Synthetic peptide
QQYNTYWT

SEQ ID NO: 1367 - protein, 5 aa, synthetic construct
  REGION 1..5: note = Synthetic peptide
KYWMY

SEQ ID NO: 1368 - protein, 17 aa, synthetic construct
  REGION 1..17: note = Synthetic peptide
YIRPSGGQTYYADSVKG

SEQ ID NO: 1369 - protein, 13 aa, synthetic construct
  REGION 1..13: note = Synthetic peptide
RRTGIPRRDAFDI

SEQ ID NO: 1370 - protein, 11 aa, synthetic construct
  REGION 1..11: note = Synthetic peptide
RASQSISSWLA

SEQ ID NO: 1371 - protein, 7 aa, synthetic construct
  REGION 1..7: note = Synthetic peptide
KASTLES

SEQ ID NO: 1372 - protein, 8 aa, synthetic construct
  REGION 1..8: note = Synthetic peptide
QQYNTYWT

SEQ ID NO: 1373 - protein, 5 aa, synthetic construct
  REGION 1..5: note = Synthetic peptide
RYQMH

SEQ ID NO: 1374 - protein, 17 aa, synthetic construct
  REGION 1..17: note = Synthetic peptide
WISPSGGITGYADSVKG

SEQ ID NO: 1375 - protein, 13 aa, synthetic construct
  REGION 1..13: note = Synthetic peptide
RRTGIPRRDAFDI

SEQ ID NO: 1376 - protein, 11 aa, synthetic construct
  REGION 1..11: note = Synthetic peptide
RASQSISSWLA

SEQ ID NO: 1377 - protein, 7 aa, synthetic construct
  REGION 1..7: note = Synthetic peptide
KASTLES

SEQ ID NO: 1378 - protein, 8 aa, synthetic construct
  REGION 1..8: note = Synthetic peptide
QQYNTYWT

SEQ ID NO: 1379 - protein, 5 aa, synthetic construct
  REGION 1..5: note = Synthetic peptide
PYNMY

SEQ ID NO: 1380 - protein, 16 aa, synthetic construct
  REGION 1..16: note = Synthetic peptide
WIVPGGVTKYADSVKG

SEQ ID NO: 1381 - protein, 13 aa, synthetic construct
  REGION 1..13: note = Synthetic peptide
RRTGIPRRDAFDI

SEQ ID NO: 1382 - protein, 11 aa, synthetic construct
  REGION 1..11: note = Synthetic peptide
RASQSISSWLA

SEQ ID NO: 1383 - protein, 7 aa, synthetic construct
  REGION 1..7: note = Synthetic peptide
KASTLES

SEQ ID NO: 1384 - protein, 8 aa, synthetic construct
  REGION 1..8: note = Synthetic peptide
QQYNTYWT

SEQ ID NO: 1385 - protein, 5 aa, synthetic construct
  REGION 1..5: note = Synthetic peptide
HYIMM

SEQ ID NO: 1386 - protein, 17 aa, synthetic construct
  REGION 1..17: note = Synthetic peptide
GIYSSGGITVYADSVKG

SEQ ID NO: 1387 - protein, 13 aa, synthetic construct
  REGION 1..13: note = Synthetic peptide
RRTGVPRRNAFDN

SEQ ID NO: 1388 - protein, 11 aa, synthetic construct
  REGION 1..11: note = Synthetic peptide
RASQSISSWLA

SEQ ID NO: 1389 - protein, 7 aa, synthetic construct
  REGION 1..7: note = Synthetic peptide
KASTLES

SEQ ID NO: 1390 - protein, 8 aa, synthetic construct
  REGION 1..8: note = Synthetic peptide
QQYNTYWT

SEQ ID NO: 1391 - protein, 5 aa, synthetic construct
  REGION 1..5: note = Synthetic peptide
HYIMM

SEQ ID NO: 1392 - protein, 17 aa, synthetic construct
  REGION 1..17: note = Synthetic peptide
GIYSSGGITVYADSVKG

SEQ ID NO: 1393 - protein, 13 aa, synthetic construct
  REGION 1..13: note = Synthetic peptide
RRTGVPRRDAFDI

SEQ ID NO: 1394 - protein, 11 aa, synthetic construct
  REGION 1..11: note = Synthetic peptide
RASQSISSWLA

SEQ ID NO: 1395 - protein, 7 aa, synthetic construct
  REGION 1..7: note = Synthetic peptide
KASTLES

SEQ ID NO: 1396 - protein, 8 aa, synthetic construct
  REGION 1..8: note = Synthetic peptide
QQYNTYWT

SEQ ID NO: 1397 - protein, 5 aa, synthetic construct
  REGION 1..5: note = Synthetic peptide
HYIMM

SEQ ID NO: 1398 - protein, 17 aa, synthetic construct
  REGION 1..17: note = Synthetic peptide
GIYSSGGITVYADSVKG

SEQ ID NO: 1399 - protein, 13 aa, synthetic construct
  REGION 1..13: note = Synthetic peptide
RRTGVPRWDAFDI

SEQ ID NO: 1400 - protein, 11 aa, synthetic construct
  REGION 1..11: note = Synthetic peptide
RASQSISSWLA

SEQ ID NO: 1401 - protein, 7 aa, synthetic construct
  REGION 1..7: note = Synthetic peptide
KASTLES

SEQ ID NO: 1402 - protein, 8 aa, synthetic construct
  REGION 1..8: note = Synthetic peptide
QQYNTYWT

SEQ ID NO: 1403 - protein, 5 aa, synthetic construct
  REGION 1..5: note = Synthetic peptide
MYQMF

SEQ ID NO: 1404 - protein, 16 aa, synthetic construct
  REGION 1..16: note = Synthetic peptide
SISPGGGTQYADSVKG

SEQ ID NO: 1405 - protein, 13 aa, synthetic construct
  REGION 1..13: note = Synthetic peptide
RRTGIPRRDAFDI

SEQ ID NO: 1406 - protein, 11 aa, synthetic construct
  REGION 1..11: note = Synthetic peptide
RASQSISSWLA

SEQ ID NO: 1407 - protein, 7 aa, synthetic construct
  REGION 1..7: note = Synthetic peptide
KASTLES

SEQ ID NO: 1408 - protein, 8 aa, synthetic construct
  REGION 1..8: note = Synthetic peptide
QQYNTYWT

SEQ ID NO: 1409 - protein, 5 aa, synthetic construct
  REGION 1..5: note = Synthetic peptide
HYIMM

SEQ ID NO: 1410 - protein, 17 aa, synthetic construct
  REGION 1..17: note = Synthetic peptide
GIYSSGGITVYADSVKG

SEQ ID NO: 1411 - protein, 13 aa, synthetic construct
  REGION 1..13: note = Synthetic peptide
RRTGVPRRDVFDI

SEQ ID NO: 1412 - protein, 11 aa, synthetic construct
  REGION 1..11: note = Synthetic peptide
RASQSISSWLA

SEQ ID NO: 1413 - protein, 7 aa, synthetic construct
  REGION 1..7: note = Synthetic peptide
KASTLES

SEQ ID NO: 1414 - protein, 8 aa, synthetic construct
  REGION 1..8: note = Synthetic peptide
QQYNTYWT

SEQ ID NO: 1415 - protein, 5 aa, synthetic construct
  REGION 1..5: note = Synthetic peptide
RYKMY

SEQ ID NO: 1416 - protein, 17 aa, synthetic construct
  REGION 1..17: note = Synthetic peptide
VIGPSGGATFYADSVKG

SEQ ID NO: 1417 - protein, 13 aa, synthetic construct
  REGION 1..13: note = Synthetic peptide
RRTGIPRRDAFDI

SEQ ID NO: 1418 - protein, 11 aa, synthetic construct
  REGION 1..11: note = Synthetic peptide
RASQSISSWLA

SEQ ID NO: 1419 - protein, 7 aa, synthetic construct
  REGION 1..7: note = Synthetic peptide
KASTLES

SEQ ID NO: 1420 - protein, 8 aa, synthetic construct
  REGION 1..8: note = Synthetic peptide
QQYNTYWT

SEQ ID NO: 1421 - protein, 5 aa, synthetic construct
  REGION 1..5: note = Synthetic peptide
RYVMW

SEQ ID NO: 1422 - protein, 16 aa, synthetic construct
  REGION 1..16: note = Synthetic peptide
SISPSGDTHYADSVKG

SEQ ID NO: 1423 - protein, 13 aa, synthetic construct
  REGION 1..13: note = Synthetic peptide
RRTGIPRRDAFDI

SEQ ID NO: 1424 - protein, 11 aa, synthetic construct
  REGION 1..11: note = Synthetic peptide
RASQSISSWLA

SEQ ID NO: 1425 - protein, 7 aa, synthetic construct
  REGION 1..7: note = Synthetic peptide
KASTLES

SEQ ID NO: 1426 - protein, 8 aa, synthetic construct
  REGION 1..8: note = Synthetic peptide
QQYNTYWT

SEQ ID NO: 1427 - protein, 5 aa, synthetic construct
  REGION 1..5: note = Synthetic peptide
HYIMM

SEQ ID NO: 1428 - protein, 17 aa, synthetic construct
  REGION 1..17: note = Synthetic peptide
GIYSSGGITVYADSVKG

SEQ ID NO: 1429 - protein, 13 aa, synthetic construct
  REGION 1..13: note = Synthetic peptide
RRTGVPRRDAFDN

SEQ ID NO: 1430 - protein, 11 aa, synthetic construct
  REGION 1..11: note = Synthetic peptide
RASQSISSWLA

SEQ ID NO: 1431 - protein, 7 aa, synthetic construct
  REGION 1..7: note = Synthetic peptide
KASTLES

SEQ ID NO: 1432 - protein, 8 aa, synthetic construct
  REGION 1..8: note = Synthetic peptide
QQYNTYWT

SEQ ID NO: 1433 - protein, 5 aa, synthetic construct
  REGION 1..5: note = Synthetic peptide
HYIMM

SEQ ID NO: 1434 - protein, 17 aa, synthetic construct
  REGION 1..17: note = Synthetic peptide
GIYSSGGITVYADSVKG

SEQ ID NO: 1435 - protein, 13 aa, synthetic construct
  REGION 1..13: note = Synthetic peptide
RRSGVPRRDDFDI

SEQ ID NO: 1436 - protein, 11 aa, synthetic construct
  REGION 1..11: note = Synthetic peptide
RASQSISSWLA

SEQ ID NO: 1437 - protein, 7 aa, synthetic construct
  REGION 1..7: note = Synthetic peptide
KASTLES

SEQ ID NO: 1438 - protein, 8 aa, synthetic construct
  REGION 1..8: note = Synthetic peptide
QQYNTYWT

SEQ ID NO: 1439 - protein, 5 aa, synthetic construct
  REGION 1..5: note = Synthetic peptide
HYIMM

SEQ ID NO: 1440 - protein, 17 aa, synthetic construct
  REGION 1..17: note = Synthetic peptide
GIYSSGGITVYADSVKG

SEQ ID NO: 1441 - protein, 13 aa, synthetic construct
  REGION 1..13: note = Synthetic peptide
RRKGIPRRDDFDI

SEQ ID NO: 1442 - protein, 11 aa, synthetic construct
  REGION 1..11: note = Synthetic peptide
RASQSISSWLA

SEQ ID NO: 1443 - protein, 7 aa, synthetic construct
  REGION 1..7: note = Synthetic peptide
KASTLES

SEQ ID NO: 1444 - protein, 8 aa, synthetic construct
  REGION 1..8: note = Synthetic peptide
QQYNTYWT

SEQ ID NO: 1445 - protein, 5 aa, synthetic construct
  REGION 1..5: note = Synthetic peptide
KYSMA

SEQ ID NO: 1446 - protein, 17 aa, synthetic construct
  REGION 1..17: note = Synthetic peptide
GIYPSGGRTLYADSVKG

SEQ ID NO: 1447 - protein, 13 aa, synthetic construct
  REGION 1..13: note = Synthetic peptide
RRTGIPRRDAFDI

SEQ ID NO: 1448 - protein, 11 aa, synthetic construct
  REGION 1..11: note = Synthetic peptide
RASQSISSWLA

SEQ ID NO: 1449 - protein, 7 aa, synthetic construct
  REGION 1..7: note = Synthetic peptide
KASTLES

SEQ ID NO: 1450 - protein, 8 aa, synthetic construct
  REGION 1..8: note = Synthetic peptide
QQYNTYWT

SEQ ID NO: 1451 - protein, 5 aa, synthetic construct
  REGION 1..5: note = Synthetic peptide
IYFMS

SEQ ID NO: 1452 - protein, 17 aa, synthetic construct
  REGION 1..17: note = Synthetic peptide
SIRSSGGPTWYADSVKG

SEQ ID NO: 1453 - protein, 13 aa, synthetic construct
  REGION 1..13: note = Synthetic peptide
RRTGIPRRDAFDI

SEQ ID NO: 1454 - protein, 11 aa, synthetic construct
  REGION 1..11: note = Synthetic peptide
RASQSISSWLA

SEQ ID NO: 1455 - protein, 7 aa, synthetic construct
  REGION 1..7: note = Synthetic peptide
KASTLES

SEQ ID NO: 1456 - protein, 8 aa, synthetic construct
  REGION 1..8: note = Synthetic peptide
QQYNTYWT

SEQ ID NO: 1457 - protein, 5 aa, synthetic construct
  REGION 1..5: note = Synthetic peptide
QYFMH

SEQ ID NO: 1458 - protein, 17 aa, synthetic construct
  REGION 1..17: note = Synthetic peptide
YIYPSGGMTEYADSVKG

SEQ ID NO: 1459 - protein, 13 aa, synthetic construct
  REGION 1..13: note = Synthetic peptide
RRTGIPRRDAFDI

SEQ ID NO: 1460 - protein, 11 aa, synthetic construct
  REGION 1..11: note = Synthetic peptide
RASQSISSWLA

SEQ ID NO: 1461 - protein, 7 aa, synthetic construct
  REGION 1..7: note = Synthetic peptide
KASTLES

SEQ ID NO: 1462 - protein, 8 aa, synthetic construct
  REGION 1..8: note = Synthetic peptide
QQYNTYWT

SEQ ID NO: 1463 - protein, 5 aa, synthetic construct
  REGION 1..5: note = Synthetic peptide
IYTMY

SEQ ID NO: 1464 - protein, 17 aa, synthetic construct
  REGION 1..17: note = Synthetic peptide
SISPSGGWTYYADSVKG

SEQ ID NO: 1465 - protein, 13 aa, synthetic construct
  REGION 1..13: note = Synthetic peptide
RRTGIPRRDAFDI

SEQ ID NO: 1466 - protein, 11 aa, synthetic construct
  REGION 1..11: note = Synthetic peptide
RASQSISSWLA

SEQ ID NO: 1467 - protein, 7 aa, synthetic construct
  REGION 1..7: note = Synthetic peptide
KASTLES

SEQ ID NO: 1468 - protein, 8 aa, synthetic construct
  REGION 1..8: note = Synthetic peptide
QQYNTYWT

SEQ ID NO: 1469 - protein, 5 aa, synthetic construct
  REGION 1..5: note = Synthetic peptide
PYLMW

SEQ ID NO: 1470 - protein, 17 aa, synthetic construct
  REGION 1..17: note = Synthetic peptide
YIGPSGGPTHYADSVKG

SEQ ID NO: 1471 - protein, 13 aa, synthetic construct
  REGION 1..13: note = Synthetic peptide
RRTGIPRRDAFDI

SEQ ID NO: 1472 - protein, 11 aa, synthetic construct
  REGION 1..11: note = Synthetic peptide
RASQSISSWLA

SEQ ID NO: 1473 - protein, 7 aa, synthetic construct
  REGION 1..7: note = Synthetic peptide
KASTLES

SEQ ID NO: 1474 - protein, 8 aa, synthetic construct
  REGION 1..8: note = Synthetic peptide
QQYNTYWT

SEQ ID NO: 1475 - protein, 5 aa, synthetic construct
  REGION 1..5: note = Synthetic peptide
IYTMM

SEQ ID NO: 1476 - protein, 17 aa, synthetic construct
  REGION 1..17: note = Synthetic peptide
SIWSSGGQTKYADSVKG

SEQ ID NO: 1477 - protein, 13 aa, synthetic construct
  REGION 1..13: note = Synthetic peptide
RRTGIPRRDAFDI

SEQ ID NO: 1478 - protein, 11 aa, synthetic construct
  REGION 1..11: note = Synthetic peptide
RASQSISSWLA

SEQ ID NO: 1479 - protein, 7 aa, synthetic construct
  REGION 1..7: note = Synthetic peptide
KASTLES

SEQ ID NO: 1480 - protein, 8 aa, synthetic construct
  REGION 1..8: note = Synthetic peptide
QQYNTYWT

SEQ ID NO: 1481 - protein, 5 aa, synthetic construct
  REGION 1..5: note = Synthetic peptide
HYIMM

SEQ ID NO: 1482 - protein, 17 aa, synthetic construct
  REGION 1..17: note = Synthetic peptide
GIYSSGGITVYADSVKG

SEQ ID NO: 1483 - protein, 13 aa, synthetic construct
  REGION 1..13: note = Synthetic peptide
RRTGVPRRDALDN

SEQ ID NO: 1484 - protein, 11 aa, synthetic construct
  REGION 1..11: note = Synthetic peptide
RASQSISSWLA

SEQ ID NO: 1485 - protein, 7 aa, synthetic construct
  REGION 1..7: note = Synthetic peptide
KASTLES

SEQ ID NO: 1486 - protein, 8 aa, synthetic construct
  REGION 1..8: note = Synthetic peptide
QQYNTYWT

SEQ ID NO: 1487 - protein, 5 aa, synthetic construct
  REGION 1..5: note = Synthetic peptide
HYIMM

SEQ ID NO: 1488 - protein, 17 aa, synthetic construct
  REGION 1..17: note = Synthetic peptide
GIYSSGGITVYADSVKG

SEQ ID NO: 1489 - protein, 13 aa, synthetic construct
  REGION 1..13: note = Synthetic peptide
RRPGVPRRDAFDI

SEQ ID NO: 1490 - protein, 11 aa, synthetic construct
  REGION 1..11: note = Synthetic peptide
RASQSISSWLA

SEQ ID NO: 1491 - protein, 7 aa, synthetic construct
  REGION 1..7: note = Synthetic peptide
KASTLES

SEQ ID NO: 1492 - protein, 8 aa, synthetic construct
  REGION 1..8: note = Synthetic peptide
QQYNTYWT

SEQ ID NO: 1493 - protein, 5 aa, synthetic construct
  REGION 1..5: note = Synthetic peptide
RYSMS

SEQ ID NO: 1494 - protein, 17 aa, synthetic construct
  REGION 1..17: note = Synthetic peptide
GISPSGGETSYADSVKG

SEQ ID NO: 1495 - protein, 13 aa, synthetic construct
  REGION 1..13: note = Synthetic peptide
RRTGIPRRDAFDI

SEQ ID NO: 1496 - protein, 11 aa, synthetic construct
  REGION 1..11: note = Synthetic peptide
RASQSISSWLA

SEQ ID NO: 1497 - protein, 7 aa, synthetic construct
  REGION 1..7: note = Synthetic peptide
KASTLES

SEQ ID NO: 1498 - protein, 8 aa, synthetic construct
  REGION 1..8: note = Synthetic peptide
QQYNTYWT

SEQ ID NO: 1499 - protein, 5 aa, synthetic construct
  REGION 1..5: note = Synthetic peptide
WYMMQ

SEQ ID NO: 1500 - protein, 16 aa, synthetic construct
  REGION 1..16: note = Synthetic peptide
RISPSGGTTYADSVKG

SEQ ID NO: 1501 - protein, 13 aa, synthetic construct
  REGION 1..13: note = Synthetic peptide
RRTGIPRRDAFDI

SEQ ID NO: 1502 - protein, 11 aa, synthetic construct
  REGION 1..11: note = Synthetic peptide
RASQSISSWLA

SEQ ID NO: 1503 - protein, 7 aa, synthetic construct
  REGION 1..7: note = Synthetic peptide
KASTLES

SEQ ID NO: 1504 - protein, 8 aa, synthetic construct
  REGION 1..8: note = Synthetic peptide
QQYNTYWT

SEQ ID NO: 1505 - protein, 5 aa, synthetic construct
  REGION 1..5: note = Synthetic peptide
QYMMM

SEQ ID NO: 1506 - protein, 17 aa, synthetic construct
  REGION 1..17: note = Synthetic peptide
GISSSGGHTDYADSVKG

SEQ ID NO: 1507 - protein, 13 aa, synthetic construct
  REGION 1..13: note = Synthetic peptide
RRTGIPRRDAFDI

SEQ ID NO: 1508 - protein, 11 aa, synthetic construct
  REGION 1..11: note = Synthetic peptide
RASQSISSWLA

SEQ ID NO: 1509 - protein, 7 aa, synthetic construct
  REGION 1..7: note = Synthetic peptide
KASTLES

SEQ ID NO: 1510 - protein, 8 aa, synthetic construct
  REGION 1..8: note = Synthetic peptide
QQYNTYWT

SEQ ID NO: 1511 - protein, 5 aa, synthetic construct
  REGION 1..5: note = Synthetic peptide
VYAMR

SEQ ID NO: 1512 - protein, 17 aa, synthetic construct
  REGION 1..17: note = Synthetic peptide
SIYPSGGKTWYADSVKG

SEQ ID NO: 1513 - protein, 13 aa, synthetic construct
  REGION 1..13: note = Synthetic peptide
RRTGIPRRDAFDI

SEQ ID NO: 1514 - protein, 11 aa, synthetic construct
  REGION 1..11: note = Synthetic peptide
RASQSISSWLA

SEQ ID NO: 1515 - protein, 7 aa, synthetic construct
  REGION 1..7: note = Synthetic peptide
KASTLES

SEQ ID NO: 1516 - protein, 8 aa, synthetic construct
  REGION 1..8: note = Synthetic peptide
QQYNTYWT

SEQ ID NO: 1517 - protein, 5 aa, synthetic construct
  REGION 1..5: note = Synthetic peptide
PYNMM

SEQ ID NO: 1518 - protein, 17 aa, synthetic construct
  REGION 1..17: note = Synthetic peptide
SIWPSGGTTDYADSVKG

SEQ ID NO: 1519 - protein, 13 aa, synthetic construct
  REGION 1..13: note = Synthetic peptide
RRTGIPRRDAFDI

SEQ ID NO: 1520 - protein, 11 aa, synthetic construct
  REGION 1..11: note = Synthetic peptide
RASQSISSWLA

SEQ ID NO: 1521 - protein, 7 aa, synthetic construct
  REGION 1..7: note = Synthetic peptide
KASTLES

SEQ ID NO: 1522 - protein, 8 aa, synthetic construct
  REGION 1..8: note = Synthetic peptide
QQYNTYWT

SEQ ID NO: 1523 - protein, 5 aa, synthetic construct
  REGION 1..5: note = Synthetic peptide
VYSMH

SEQ ID NO: 1524 - protein, 17 aa, synthetic construct
  REGION 1..17: note = Synthetic peptide
VIGPSGGITLYADSVKG

SEQ ID NO: 1525 - protein, 13 aa, synthetic construct
  REGION 1..13: note = Synthetic peptide
RRTGIPRRDAFDI

SEQ ID NO: 1526 - protein, 11 aa, synthetic construct
  REGION 1..11: note = Synthetic peptide
RASQSISSWLA

SEQ ID NO: 1527 - protein, 7 aa, synthetic construct
  REGION 1..7: note = Synthetic peptide
KASTLES

SEQ ID NO: 1528 - protein, 8 aa, synthetic construct
  REGION 1..8: note = Synthetic peptide
QQYNTYWT

SEQ ID NO: 1529 - protein, 5 aa, synthetic construct
  REGION 1..5: note = Synthetic peptide
HYIMM

SEQ ID NO: 1530 - protein, 17 aa, synthetic construct
  REGION 1..17: note = Synthetic peptide
GIYSSGGITVYADSVKG

SEQ ID NO: 1531 - protein, 13 aa, synthetic construct
  REGION 1..13: note = Synthetic peptide
RRRGIPRRDAFDI

SEQ ID NO: 1532 - protein, 11 aa, synthetic construct
  REGION 1..11: note = Synthetic peptide
RASQSISSWLA

SEQ ID NO: 1533 - protein, 7 aa, synthetic construct
  REGION 1..7: note = Synthetic peptide
KASTLES

SEQ ID NO: 1534 - protein, 8 aa, synthetic construct
  REGION 1..8: note = Synthetic peptide
QQYNTYWT

SEQ ID NO: 1535 - protein, 5 aa, synthetic construct
  REGION 1..5: note = Synthetic peptide
HYIMM

SEQ ID NO: 1536 - protein, 17 aa, synthetic construct
  REGION 1..17: note = Synthetic peptide
GIYSSGGITVYADSVKG

SEQ ID NO: 1537 - protein, 13 aa, synthetic construct
  REGION 1..13: note = Synthetic peptide
RRMGIPRRNAFDI

SEQ ID NO: 1538 - protein, 11 aa, synthetic construct
  REGION 1..11: note = Synthetic peptide
RASQSISSWLA

SEQ ID NO: 1539 - protein, 7 aa, synthetic construct
  REGION 1..7: note = Synthetic peptide
KASTLES

SEQ ID NO: 1540 - protein, 8 aa, synthetic construct
  REGION 1..8: note = Synthetic peptide
QQYNTYWT

SEQ ID NO: 1541 - protein, 5 aa, synthetic construct
  REGION 1..5: note = Synthetic peptide
LYVMY

SEQ ID NO: 1542 - protein, 17 aa, synthetic construct
  REGION 1..17: note = Synthetic peptide
YIVPSGGPTAYADSVKG

SEQ ID NO: 1543 - protein, 13 aa, synthetic construct
  REGION 1..13: note = Synthetic peptide
RRTGIPRRDAFDI

SEQ ID NO: 1544 - protein, 11 aa, synthetic construct
  REGION 1..11: note = Synthetic peptide
RASQSISSWLA

SEQ ID NO: 1545 - protein, 7 aa, synthetic construct
  REGION 1..7: note = Synthetic peptide
KASTLES

SEQ ID NO: 1546 - protein, 8 aa, synthetic construct
  REGION 1..8: note = Synthetic peptide
QQYNTYWT

SEQ ID NO: 1547 - protein, 5 aa, synthetic construct
  REGION 1..5: note = Synthetic peptide
PYDML

SEQ ID NO: 1548 - protein, 17 aa, synthetic construct
  REGION 1..17: note = Synthetic peptide
YIVSSGGLTKYADSVKG

SEQ ID NO: 1549 - protein, 13 aa, synthetic construct
  REGION 1..13: note = Synthetic peptide
RRTGIPRRDAFDI

SEQ ID NO: 1550 - protein, 11 aa, synthetic construct
  REGION 1..11: note = Synthetic peptide
RASQSISSWLA

SEQ ID NO: 1551 - protein, 7 aa, synthetic construct
  REGION 1..7: note = Synthetic peptide
KASTLES

SEQ ID NO: 1552 - protein, 8 aa, synthetic construct
  REGION 1..8: note = Synthetic peptide
QQYNTYWT

SEQ ID NO: 1553 - protein, 5 aa, synthetic construct
  REGION 1..5: note = Synthetic peptide
QYTMV

SEQ ID NO: 1554 - protein, 15 aa, synthetic construct
  REGION 1..15: note = Synthetic peptide
WIYSSRANYADSVKG

SEQ ID NO: 1555 - protein, 13 aa, synthetic construct
  REGION 1..13: note = Synthetic peptide
RRTGIPRRDAFDI

SEQ ID NO: 1556 - protein, 11 aa, synthetic construct
  REGION 1..11: note = Synthetic peptide
RASQSISSWLA

SEQ ID NO: 1557 - protein, 7 aa, synthetic construct
  REGION 1..7: note = Synthetic peptide
KASTLES

SEQ ID NO: 1558 - protein, 8 aa, synthetic construct
  REGION 1..8: note = Synthetic peptide
QQYNTYWT

SEQ ID NO: 1559 - protein, 5 aa, synthetic construct
  REGION 1..5: note = Synthetic peptide
HYIMM

SEQ ID NO: 1560 - protein, 17 aa, synthetic construct
  REGION 1..17: note = Synthetic peptide
GIYSSGGITVYADSVKG

SEQ ID NO: 1561 - protein, 13 aa, synthetic construct
  REGION 1..13: note = Synthetic peptide
RRTGIPRRDAFDN

SEQ ID NO: 1562 - protein, 11 aa, synthetic construct
  REGION 1..11: note = Synthetic peptide
RASQSISSWLA

SEQ ID NO: 1563 - protein, 7 aa, synthetic construct
  REGION 1..7: note = Synthetic peptide
KASTLES

SEQ ID NO: 1564 - protein, 8 aa, synthetic construct
  REGION 1..8: note = Synthetic peptide
QQYNTYWT

SEQ ID NO: 1565 - protein, 5 aa, synthetic construct
  REGION 1..5: note = Synthetic peptide
HYIMM

SEQ ID NO: 1566 - protein, 17 aa, synthetic construct
  REGION 1..17: note = Synthetic peptide
GIYSSGGITVYADSVKG

SEQ ID NO: 1567 - protein, 13 aa, synthetic construct
  REGION 1..13: note = Synthetic peptide
RRTGIPRWDAFDI

SEQ ID NO: 1568 - protein, 11 aa, synthetic construct
  REGION 1..11: note = Synthetic peptide
RASQSISSWLA

SEQ ID NO: 1569 - protein, 7 aa, synthetic construct
  REGION 1..7: note = Synthetic peptide
KASTLES

SEQ ID NO: 1570 - protein, 8 aa, synthetic construct
  REGION 1..8: note = Synthetic peptide
QQYNTYWT

SEQ ID NO: 1571 - protein, 5 aa, synthetic construct
  REGION 1..5: note = Synthetic peptide
PYMMM

SEQ ID NO: 1572 - protein, 17 aa, synthetic construct
  REGION 1..17: note = Synthetic peptide
GIYPSGGYTVYADSVKG

SEQ ID NO: 1573 - protein, 13 aa, synthetic construct
  REGION 1..13: note = Synthetic peptide
RRTGIPRRDAFDI

SEQ ID NO: 1574 - protein, 11 aa, synthetic construct
  REGION 1..11: note = Synthetic peptide
RASQSISSWLA

SEQ ID NO: 1575 - protein, 7 aa, synthetic construct
  REGION 1..7: note = Synthetic peptide
KASTLES

SEQ ID NO: 1576 - protein, 8 aa, synthetic construct
  REGION 1..8: note = Synthetic peptide
QQYNTYWT

SEQ ID NO: 1577 - protein, 5 aa, synthetic construct
  REGION 1..5: note = Synthetic peptide
HYIMM

SEQ ID NO: 1578 - protein, 17 aa, synthetic construct
  REGION 1..17: note = Synthetic peptide
GIYSSGGITVYADSVKG

SEQ ID NO: 1579 - protein, 13 aa, synthetic construct
  REGION 1..13: note = Synthetic peptide
RRTGIPRRDAFEI

SEQ ID NO: 1580 - protein, 11 aa, synthetic construct
  REGION 1..11: note = Synthetic peptide
RASQSISSWLA

SEQ ID NO: 1581 - protein, 7 aa, synthetic construct
  REGION 1..7: note = Synthetic peptide
KASTLES

SEQ ID NO: 1582 - protein, 8 aa, synthetic construct
  REGION 1..8: note = Synthetic peptide
QQYNTYWT

SEQ ID NO: 1583 - protein, 5 aa, synthetic construct
  REGION 1..5: note = Synthetic peptide
NYSMD

SEQ ID NO: 1584 - protein, 17 aa, synthetic construct
  REGION 1..17: note = Synthetic peptide
RIYSSGGGTIYADSVKG

SEQ ID NO: 1585 - protein, 13 aa, synthetic construct
  REGION 1..13: note = Synthetic peptide
RRTGIPRRDAFDI

SEQ ID NO: 1586 - protein, 11 aa, synthetic construct
  REGION 1..11: note = Synthetic peptide
RASQSISSWLA

SEQ ID NO: 1587 - protein, 7 aa, synthetic construct
  REGION 1..7: note = Synthetic peptide
KASTLES

SEQ ID NO: 1588 - protein, 8 aa, synthetic construct
  REGION 1..8: note = Synthetic peptide
QQYNTYWT

SEQ ID NO: 1589 - protein, 5 aa, synthetic construct
  REGION 1..5: note = Synthetic peptide
HYVMM

SEQ ID NO: 1590 - protein, 17 aa, synthetic construct
  REGION 1..17: note = Synthetic peptide
YIVPSGGVTAYADSVKG

SEQ ID NO: 1591 - protein, 13 aa, synthetic construct
  REGION 1..13: note = Synthetic peptide
RRTGIPRRDAFDI

SEQ ID NO: 1592 - protein, 11 aa, synthetic construct
  REGION 1..11: note = Synthetic peptide
RASQSISSWLA

SEQ ID NO: 1593 - protein, 7 aa, synthetic construct
  REGION 1..7: note = Synthetic peptide
KASTLES

SEQ ID NO: 1594 - protein, 8 aa, synthetic construct
  REGION 1..8: note = Synthetic peptide
QQYNTYWT

SEQ ID NO: 1595 - protein, 5 aa, synthetic construct
  REGION 1..5: note = Synthetic peptide
HYIMM

SEQ ID NO: 1596 - protein, 17 aa, synthetic construct
  REGION 1..17: note = Synthetic peptide
GIYSSGGITVYADSVKG

SEQ ID NO: 1597 - protein, 13 aa, synthetic construct
  REGION 1..13: note = Synthetic peptide
RRTGIPRRDAFDS

SEQ ID NO: 1598 - protein, 11 aa, synthetic construct
  REGION 1..11: note = Synthetic peptide
RASQSISSWLA

SEQ ID NO: 1599 - protein, 7 aa, synthetic construct
  REGION 1..7: note = Synthetic peptide
KASTLES

SEQ ID NO: 1600 - protein, 8 aa, synthetic construct
  REGION 1..8: note = Synthetic peptide
QQYNTYWT

SEQ ID NO: 1601 - protein, 5 aa, synthetic construct
  REGION 1..5: note = Synthetic peptide
IYLMI

SEQ ID NO: 1602 - protein, 17 aa, synthetic construct
  REGION 1..17: note = Synthetic peptide
YIGPSGGPTEYADSVKG

SEQ ID NO: 1603 - protein, 13 aa, synthetic construct
  REGION 1..13: note = Synthetic peptide
RRTGIPRRDAFDI

SEQ ID NO: 1604 - protein, 11 aa, synthetic construct
  REGION 1..11: note = Synthetic peptide
RASQSISSWLA

SEQ ID NO: 1605 - protein, 7 aa, synthetic construct
  REGION 1..7: note = Synthetic peptide
KASTLES

SEQ ID NO: 1606 - protein, 8 aa, synthetic construct
  REGION 1..8: note = Synthetic peptide
QQYNTYWT

SEQ ID NO: 1607 - protein, 5 aa, synthetic construct
  REGION 1..5: note = Synthetic peptide
YYIMF

SEQ ID NO: 1608 - protein, 17 aa, synthetic construct
  REGION 1..17: note = Synthetic peptide
YISPSGGYTHYADSVKG

SEQ ID NO: 1609 - protein, 13 aa, synthetic construct
  REGION 1..13: note = Synthetic peptide
RRTGIPRRDAFDI

SEQ ID NO: 1610 - protein, 11 aa, synthetic construct
  REGION 1..11: note = Synthetic peptide
RASQSISSWLA

SEQ ID NO: 1611 - protein, 7 aa, synthetic construct
  REGION 1..7: note = Synthetic peptide
KASTLES

SEQ ID NO: 1612 - protein, 8 aa, synthetic construct
  REGION 1..8: note = Synthetic peptide
QQYNTYWT

SEQ ID NO: 1613 - protein, 5 aa, synthetic construct
  REGION 1..5: note = Synthetic peptide
HYIMM

SEQ ID NO: 1614 - protein, 17 aa, synthetic construct
  REGION 1..17: note = Synthetic peptide
GIYSSGGITVYADSVKG

SEQ ID NO: 1615 - protein, 13 aa, synthetic construct
  REGION 1..13: note = Synthetic peptide
RRTGIPRRDVFDI

SEQ ID NO: 1616 - protein, 11 aa, synthetic construct
  REGION 1..11: note = Synthetic peptide
RASQSISSWLA

SEQ ID NO: 1617 - protein, 7 aa, synthetic construct
  REGION 1..7: note = Synthetic peptide
KASTLES

SEQ ID NO: 1618 - protein, 8 aa, synthetic construct
  REGION 1..8: note = Synthetic peptide
QQYNTYWT

SEQ ID NO: 1619 - protein, 5 aa, synthetic construct
  REGION 1..5: note = Synthetic peptide
HYIMM

SEQ ID NO: 1620 - protein, 17 aa, synthetic construct
  REGION 1..17: note = Synthetic peptide
GIYSSGGITVYADSVKG

SEQ ID NO: 1621 - protein, 13 aa, synthetic construct
  REGION 1..13: note = Synthetic peptide
RRTGIPRRDSFDI

SEQ ID NO: 1622 - protein, 11 aa, synthetic construct
  REGION 1..11: note = Synthetic peptide
RASQSISSWLA

SEQ ID NO: 1623 - protein, 7 aa, synthetic construct
  REGION 1..7: note = Synthetic peptide
KASTLES

SEQ ID NO: 1624 - protein, 8 aa, synthetic construct
  REGION 1..8: note = Synthetic peptide
QQYNTYWT

SEQ ID NO: 1625 - protein, 5 aa, synthetic construct
  REGION 1..5: note = Synthetic peptide
TYAMV

SEQ ID NO: 1626 - protein, 17 aa, synthetic construct
  REGION 1..17: note = Synthetic peptide
SIYPSGGITTYADSVKG

SEQ ID NO: 1627 - protein, 13 aa, synthetic construct
  REGION 1..13: note = Synthetic peptide
RRTGIPRRDAFDI

SEQ ID NO: 1628 - protein, 11 aa, synthetic construct
  REGION 1..11: note = Synthetic peptide
RASQSISSWLA

SEQ ID NO: 1629 - protein, 7 aa, synthetic construct
  REGION 1..7: note = Synthetic peptide
KASTLES

SEQ ID NO: 1630 - protein, 8 aa, synthetic construct
  REGION 1..8: note = Synthetic peptide
QQYNTYWT

SEQ ID NO: 1631 - protein, 5 aa, synthetic construct
  REGION 1..5: note = Synthetic peptide
HYIMM

SEQ ID NO: 1632 - protein, 17 aa, synthetic construct
  REGION 1..17: note = Synthetic peptide
GIYSSGGITVYADSVKG

SEQ ID NO: 1633 - protein, 13 aa, synthetic construct
  REGION 1..13: note = Synthetic peptide
RRSGIPRRDAFDI

SEQ ID NO: 1634 - protein, 11 aa, synthetic construct
  REGION 1..11: note = Synthetic peptide
RASQSISSWLA

SEQ ID NO: 1635 - protein, 7 aa, synthetic construct
  REGION 1..7: note = Synthetic peptide
KASTLES

SEQ ID NO: 1636 - protein, 8 aa, synthetic construct
  REGION 1..8: note = Synthetic peptide
QQYNTYWT

SEQ ID NO: 1637 - protein, 5 aa, synthetic construct
  REGION 1..5: note = Synthetic peptide
PYTMI

SEQ ID NO: 1638 - protein, 17 aa, synthetic construct
  REGION 1..17: note = Synthetic peptide
SISSSGGMTPYADSVKG

SEQ ID NO: 1639 - protein, 13 aa, synthetic construct
  REGION 1..13: note = Synthetic peptide
RRTGIPRRDAFDI

SEQ ID NO: 1640 - protein, 107 aa, synthetic construct; identical to SEQ ID NO: 279
  REGION 1..107: note = Synthetic polypeptide

SEQ ID NO: 1641 - protein, 139 aa, synthetic construct
  REGION 1..139: note = Synthetic polypeptide
EVQLLESGGGLVQPGGSLRLSCAASGFTFSQYMMMWVRQAPGKGLEWVSGISSSGGHTDYADSVKGRFTISRDNSKNTLYLQMNSLRAEDTAVYYCAYRRTGIPRRDAFDIWGQGTMVTVSSASTKGPSVFPLAPSSKS

SEQ ID NO: 1642 - protein, 107 aa, synthetic construct; identical to SEQ ID NO: 279
  REGION 1..107: note = Synthetic polypeptide

SEQ ID NO: 1643 - protein, 139 aa, synthetic construct
  REGION 1..139: note = Synthetic polypeptide
EVQLLESGGGLVQPGGSLRLSCAASGFTFSPYMMMWVRQAPGKGLEWVSGIYPSGGYTVYADSVKGRFTISRDNSKNTLYLQMNSLRAEDTAVYYCAYRRTGIPRRDAFDIWGQGTMVTVSSASTKGPSVFPLAPSSKS

SEQ ID NO: 1644 - protein, 107 aa, synthetic construct; identical to SEQ ID NO: 279
  REGION 1..107: note = Synthetic polypeptide

SEQ ID NO: 1645 - protein, 139 aa, synthetic construct
  REGION 1..139: note = Synthetic polypeptide
EVQLLESGGGLVQPGGSLRLSCAASGFTFSPYLMWWVRQAPGKGLEWVSYIGPSGGPTHYADSVKGRFTISRDNSKNTLYLQMNSLRAEDTAVYYCAYRRTGIPRRDAFDIWGQGTMVTVSSASTKGPSVFPLAPSSKS

SEQ ID NO: 1646 - protein, 107 aa, synthetic construct; identical to SEQ ID NO: 279
  REGION 1..107: note = Synthetic polypeptide

SEQ ID NO: 1647 - protein, 139 aa, synthetic construct
  REGION 1..139: note = Synthetic polypeptide
EVQLLESGGGLVQPGGSLRLSCAASGFTFSKYWMYWVRQAPGKGLEWVSYIRPSGGQTYYADSVKGRFTISRDNSKNTLYLQMNSLRAEDTAVYYCAYRRTGIPRRDAFDIWGQGTMVTVSSASTKGPSVFPLAPSSKS

SEQ ID NO: 1648 - protein, 107 aa, synthetic construct; identical to SEQ ID NO: 279
  REGION 1..107: note = Synthetic polypeptide

SEQ ID NO: 1649 - protein, 138 aa, synthetic construct
  REGION 1..138: note = Synthetic polypeptide
EVQLLESGGGLVQPGGSLRLSCAASGFTFSMYQMFWVRQAPGKGLEWVSSISPGGGTQYADSVKGRFTISRDNSKNTLYLQMNSLRAEDTAVYYCAYRRTGIPRRDAFDIWGQGTMVTVSSASTKGPSVFPLAPSSKS

SEQ ID NO: 1650 - protein, 107 aa, synthetic construct; identical to SEQ ID NO: 279
  REGION 1..107: note = Synthetic polypeptide

SEQ ID NO: 1651 - protein, 139 aa, synthetic construct
  REGION 1..139: note = Synthetic polypeptide
EVQLLESGGGLVQPGGSLRLSCAASGFTFSIYGMFWVRQAPGKGLEWVSGIGPSGGPTKYADSVKGRFTISRDNSKNTLYLQMNSLRAEDTAVYYCAYRRTGIPRRDAFDIWGQGTMVTVSSASTKGPSVFPLAPSSKS

SEQ ID NO: 1652 - protein, 107 aa, synthetic construct; identical to SEQ ID NO: 279
  REGION 1..107: note = Synthetic polypeptide

SEQ ID NO: 1653 - protein, 139 aa, synthetic construct
  REGION 1..139: note = Synthetic polypeptide
EVQLLESGGGLVQPGGSLRLSCAASGFTFSYYIMFWVRQAPGKGLEWVSYISPSGGYTHYADSVKGRFTISRDNSKNTLYLQMNSLRAEDTAVYYCAYRRTGIPRRDAFDIWGQGTMVTVSSASTKGPSVFPLAPSSKS

SEQ ID NO: 1654 - protein, 107 aa, synthetic construct; identical to SEQ ID NO: 279
  REGION 1..107: note = Synthetic polypeptide

SEQ ID NO: 1655 - protein, 139 aa, synthetic construct
  REGION 1..139: note = Synthetic polypeptide
EVQLLESGGGLVQPGGSLRLSCAASGFTFSHYVMMWVRQAPGKGLEWVSYIVPSGGVTAYADSVKGRFTISRDNSKNTLYLQMNSLRAEDTAVYYCAYRRTGIPRRDAFDIWGQGTMVTVSSASTKGPSVFPLAPSSKS

SEQ ID NO: 1656 - protein, 107 aa, synthetic construct; identical to SEQ ID NO: 279
  REGION 1..107: note = Synthetic polypeptide

SEQ ID NO: 1657 - protein, 139 aa, synthetic construct
  REGION 1..139: note = Synthetic polypeptide
EVQLLESGGGLVQPGGSLRLSCAASGFTFSPYNMMWVRQAPGKGLEWVSSIWPSGGTTDYADSVKGRFTISRDNSKNTLYLQMNSLRAEDTAVYYCAYRRTGIPRRDAFDIWGQGTMVTVSSASTKGPSVFPLAPSSKS

SEQ ID NO: 1658 - protein, 107 aa, synthetic construct; identical to SEQ ID NO: 279
  REGION 1..107: note = Synthetic polypeptide

SEQ ID NO: 1659 - protein, 139 aa, synthetic construct
  REGION 1..139: note = Synthetic polypeptide
EVQLLESGGGLVQPGGSLRLSCAASGFTFSIYSMHWVRQAPGKGLEWVSSIYPSRGMTWYADSVKGRFTISRDNSKNTLYLQMNSLRAEDTAVYYCAYRRTGIPRRDAFDIWGQGTMVTVSSASTKGPSVFPLAPSSKS

SEQ ID NO: 1660 - protein, 107 aa, synthetic construct; identical to SEQ ID NO: 279
  REGION 1..107: note = Synthetic polypeptide

SEQ ID NO: 1661 - protein, 139 aa, synthetic construct
  REGION 1..139: note = Synthetic polypeptide
EVQLLESGGGLVQPGGSLRLSCAASGFTFSVYSMHWVRQAPGKGLEWVSVIGPSGGITLYADSVKGRFTISRDNSKNTLYLQMNSLRAEDTAVYYCAYRRTGIPRRDAFDIWGQGTMVTVSSASTKGPSVFPLAPSSKS

SEQ ID NO: 1662 - protein, 107 aa, synthetic construct; identical to SEQ ID NO: 279
  REGION 1..107: note = Synthetic polypeptide

SEQ ID NO: 1663 - protein, 139 aa, synthetic construct
  REGION 1..139: note = Synthetic polypeptide
EVQLLESGGGLVQPGGSLRLSCAASGFTFSRYSMRWVRQAPGKGLEWVSVIYPSGGQTYYADSVKGRFTISRDNSKNTLYLQMNSLRAEDTAVYYCAYRRTGIPRRDAFDIWGQGTMVTVSSASTKGPSVFPLAPSSKS

SEQ ID NO: 1664 - protein, 107 aa, synthetic construct; identical to SEQ ID NO: 279
  REGION 1..107: note = Synthetic polypeptide

SEQ ID NO: 1665 - protein, 139 aa, synthetic construct
  REGION 1..139: note = Synthetic polypeptide
EVQLLESGGGLVQPGGSLRLSCAASGFTFSNYSMDWVRQAPGKGLEWVSRIYSSGGGTIYADSVKGRFTISRDNSKNTLYLQMNSLRAEDTAVYYCAYRRTGIPRRDAFDIWGQGTMVTVSSASTKGPSVFPLAPSSKS

SEQ ID NO: 1666 - protein, 107 aa, synthetic construct; identical to SEQ ID NO: 279
  REGION 1..107: note = Synthetic polypeptide

SEQ ID NO: 1667 - protein, 138 aa, synthetic construct
  REGION 1..138: note = Synthetic polypeptide
EVQLLESGGGLVQPGGSLRLSCAASGFTFSRYVMWWVRQAPGKGLEWVSSISPSGDTHYADSVKGRFTISRDNSKNTLYLQMNSLRAEDTAVYYCAYRRTGIPRRDAFDIWGQGTMVTVSSASTKGPSVFPLAPSSKS

SEQ ID NO: 1668 - protein, 107 aa, synthetic construct; identical to SEQ ID NO: 279
  REGION 1..107: note = Synthetic polypeptide

SEQ ID NO: 1669 - protein, 139 aa, synthetic construct
  REGION 1..139: note = Synthetic polypeptide
EVQLLESGGGLVQPGGSLRLSCAASGFTFSIYDMIWVRQAPGKGLEWVSSIYPSGGNTSYADSVKGRFTISRDNSKNTLYLQMNSLRAEDTAVYYCAYRRTGIPRRDAFDIWGQGTMVTVSSASTKGPSVFPLAPSSKS

SEQ ID NO: 1670 - protein, 107 aa, synthetic construct; identical to SEQ ID NO: 279
  REGION 1..107: note = Synthetic polypeptide

SEQ ID NO: 1671 - protein, 139 aa, synthetic construct
  REGION 1..139: note = Synthetic polypeptide
EVQLLESGGGLVQPGGSLRLSCAASGFTFSIYSMQWVRQAPGKGLEWVSSIGSSGGKTLYADSVKGRFTISRDNSKNTLYLQMNSLRAEDTAVYYCAYRRTGIPRRDAFDIWGQGTMVTVSSASTKGPSVFPLAPSSKS

SEQ ID NO: 1672 - protein, 107 aa, synthetic construct; identical to SEQ ID NO: 279
  REGION 1..107: note = Synthetic polypeptide

SEQ ID NO: 1673 - protein, 139 aa, synthetic construct
  REGION 1..139: note = Synthetic polypeptide
EVQLLESGGGLVQPGGSLRLSCAASGFTFSVYNMHWVRQAPGKGLEWVSSIYPSGGMTTYADSVKGRFTISRDNSKNTLYLQMNSLRAEDTAVYYCAYRRTGIPRRDAFDIWGQGTMVTVSSASTKGPSVFPLAPSSKS

SEQ ID NO: 1674 - protein, 107 aa, synthetic construct; identical to SEQ ID NO: 279
  REGION 1..107: note = Synthetic polypeptide

SEQ ID NO: 1675 - protein, 139 aa, synthetic construct
  REGION 1..139: note = Synthetic polypeptide
EVQLLESGGGLVQPGGSLRLSCAASGFTFSPYDMLWVRQAPGKGLEWVSYIVSSGGLTKYADSVKGRFTISRDNSKNTLYLQMNSLRAEDTAVYYCAYRRTGIPRRDAFDIWGQGTMVTVSSASTKGPSVFPLAPSSKS

SEQ ID NO: 1676 - protein, 107 aa, synthetic construct; identical to SEQ ID NO: 279
  REGION 1..107: note = Synthetic polypeptide

SEQ ID NO: 1677 - protein, 139 aa, synthetic construct
  REGION 1..139: note = Synthetic polypeptide
EVQLLESGGGLVQPGGSLRLSCAASGFTFSTYTMRWVRQAPGKGLEWVSSIYPSGGKTQYADSVKGRFTISRDNSKNTLYLQMNSLRAEDTAVYYCAYRRTGIPRRDAFDIWGQGTMVTVSSASTKGPSVFPLAPSSKS

SEQ ID NO: 1678 - protein, 107 aa, synthetic construct; identical to SEQ ID NO: 279
  REGION 1..107: note = Synthetic polypeptide

SEQ ID NO: 1679 - protein, 139 aa, synthetic construct
  REGION 1..139: note = Synthetic polypeptide
EVQLLESGGGLVQPGGSLRLSCAASGFTFSIYHMYWVRQAPGKGLEWVSSIGPSGGPTGYADSVKGRFTISRDNSKNTLYLQMNSLRAEDTAVYYCAYRRTGIPRRDAFDIWGQGTMVTVSSASTKGPSVFPLAPSSKS

SEQ ID NO: 1680 - protein, 107 aa, synthetic construct; identical to SEQ ID NO: 279
  REGION 1..107: note = Synthetic polypeptide

SEQ ID NO: 1681 - protein, 139 aa, synthetic construct
  REGION 1..139: note = Synthetic polypeptide
EVQLLESGGGLVQPGGSLRLSCAASGFTFSIYSMFWVRQAPGKGLEWVSSIGPSGGVTHYADSVKGRFTISRDNSKNTLYLQMNSLRAEDTAVYYCAYRRTGIPRRDAFDIWGQGTMVTVSSASTKGPSVFPLAPSSKS

SEQ ID NO: 1682 - protein, 107 aa, synthetic construct; identical to SEQ ID NO: 279
  REGION 1..107: note = Synthetic polypeptide

SEQ ID NO: 1683 - protein, 139 aa, synthetic construct
  REGION 1..139: note = Synthetic polypeptide
EVQLLESGGGLVQPGGSLRLSCAASGFTFSVYAMRWVRQAPGKGLEWVSSIYPSGGKTWYADSVKGRFTISRDNSKNTLYLQMNSLRAEDTAVYYCAYRRTGIPRRDAFDIWGQGTMVTVSSASTKGPSVFPLAPSSKS

SEQ ID NO: 1684 - protein, 107 aa, synthetic construct; identical to SEQ ID NO: 279
  REGION 1..107: note = Synthetic polypeptide

SEQ ID NO: 1685 - protein, 139 aa, synthetic construct
  REGION 1..139: note = Synthetic polypeptide
EVQLLESGGGLVQPGGSLRLSCAASGFTFSTYAMVWVRQAPGKGLEWVSSIYPSGGITTYADSVKGRFTISRDNSKNTLYLQMNSLRAEDTAVYYCAYRRTGIPRRDAFDIWGQGTMVTVSSASTKGPSVFPLAPSSKS

SEQ ID NO: 1686 - protein, 107 aa, synthetic construct; identical to SEQ ID NO: 279
  REGION 1..107: note = Synthetic polypeptide

SEQ ID NO: 1687 - protein, 139 aa, synthetic construct
  REGION 1..139: note = Synthetic polypeptide
EVQLLESGGGLVQPGGSLRLSCAASGFTFSSYNMHWVRQAPGKGLEWVSSIVPSGGKTNYADSVKGRFTISRDNSKNTLYLQMNSLRAEDTAVYYCAYRRTGIPRRDAFDIWGQGTMVTVSSASTKGPSVFPLAPSSKS

SEQ ID NO: 1688 - protein, 107 aa, synthetic construct; identical to SEQ ID NO: 279
  REGION 1..107: note = Synthetic polypeptide

SEQ ID NO: 1689 - protein, 139 aa, synthetic construct
  REGION 1..139: note = Synthetic polypeptide
EVQLLESGGGLVQPGGSLRLSCAASGFTFSIYNMIWVRQAPGKGLEWVSSIYPSGGWTTYADSVKGRFTISRDNSKNTLYLQMNSLRAEDTAVYYCAYRRTGIPRRDAFDIWGQGTMVTVSSASTKGPSVFPLAPSSKS

SEQ ID NO: 1690 - protein, 107 aa, synthetic construct; identical to SEQ ID NO: 279
  REGION 1..107: note = Synthetic polypeptide

SEQ ID NO: 1691 - protein, 139 aa, synthetic construct
  REGION 1..139: note = Synthetic polypeptide
EVQLLESGGGLVQPGGSLRLSCAASGFTFSPYTMIWVRQAPGKGLEWVSSISSSGGMTPYADSVKGRFTISRDNSKNTLYLQMNSLRAEDTAVYYCAYRRTGIPRRDAFDIWGQGTMVTVSSASTKGPSVFPLAPSSKS

SEQ ID NO: 1692 - protein, 107 aa, synthetic construct; identical to SEQ ID NO: 279
  REGION 1..107: note = Synthetic polypeptide

SEQ ID NO: 1693 - protein, 139 aa, synthetic construct
  REGION 1..139: note = Synthetic polypeptide
EVQLLESGGGLVQPGGSLRLSCAASGFTFSRYSMIWVRQAPGKGLEWVSSIWSSGGATEYADSVKGRFTISRDNSKNTLYLQMNSLRAEDTAVYYCAYRRTGIPRRDAFDIWGQGTMVTVSSASTKGPSVFPLAPSSKS

SEQ ID NO: 1694 - protein, 107 aa, synthetic construct; identical to SEQ ID NO: 279
  REGION 1..107: note = Synthetic polypeptide

SEQ ID NO: 1695 - protein, 139 aa, synthetic construct
  REGION 1..139: note = Synthetic polypeptide
EVQLLESGGGLVQPGGSLRLSCAASGFTFSIYSMHWVRQAPGKGLEWVSSIYSSGGPTKYADSVKGRFTISRDNSKNTLYLQMNSLRAEDTAVYYCAYRRTGIPRRDAFDIWGQGTMVTVSSASTKGPSVFPLAPSSKS

SEQ ID NO: 1696 - protein, 107 aa, synthetic construct; identical to SEQ ID NO: 279
  REGION 1..107: note = Synthetic polypeptide

SEQ ID NO: 1697 - protein, 139 aa, synthetic construct
  REGION 1..139: note = Synthetic polypeptide
EVQLLESGGGLVQPGGSLRLSCAASGFTFSRYQMHWVRQAPGKGLEWVSWISPSGGITGYADSVKGRFTISRDNSKNTLYLQMNSLRAEDTAVYYCAYRRTGIPRRDAFDIWGQGTMVTVSSASTKGPSVFPLAPSSKS

SEQ ID NO: 1698 - protein, 107 aa, synthetic construct; identical to SEQ ID NO: 279
  REGION 1..107: note = Synthetic polypeptide

SEQ ID NO: 1699 - protein, 138 aa, synthetic construct
  REGION 1..138: note = Synthetic polypeptide
EVQLLESGGGLVQPGGSLRLSCAASGFTFSWYMMQWVRQAPGKGLEWVSRISPSGGTTYADSVKGRFTISRDNSKNTLYLQMNSLRAEDTAVYYCAYRRTGIPRRDAFDIWGQGTMVTVSSASTKGPSVFPLAPSSKS

SEQ ID NO: 1700 - protein, 107 aa, synthetic construct; identical to SEQ ID NO: 279
  REGION 1..107: note = Synthetic polypeptide

SEQ ID NO: 1701 - protein, 139 aa, synthetic construct
  REGION 1..139: note = Synthetic polypeptide
EVQLLESGGGLVQPGGSLRLSCAASGFTFSIYFMSWVRQAPGKGLEWVSSIRSSGGPTWYADSVKGRFTISRDNSKNTLYLQMNSLRAEDTAVYYCAYRRTGIPRRDAFDIWGQGTMVTVSSASTKGPSVFPLAPSSKS

SEQ ID NO: 1702 - protein, 107 aa, synthetic construct; identical to SEQ ID NO: 279
  REGION 1..107: note = Synthetic polypeptide

SEQ ID NO: 1703 - protein, 139 aa, synthetic construct
  REGION 1..139: note = Synthetic polypeptide
EVQLLESGGGLVQPGGSLRLSCAASGFTFSVYSMTWVRQAPGKGLEWVSSIGSSGGSTTYADSVKGRFTISRDNSKNTLYLQMNSLRAEDTAVYYCAYRRTGIPRRDAFDIWGQGTMVTVSSASTKGPSVFPLAPSSKS

SEQ ID NO: 1704 - protein, 107 aa, synthetic construct; identical to SEQ ID NO: 279
  REGION 1..107: note = Synthetic polypeptide

SEQ ID NO: 1705 - protein, 139 aa, synthetic construct
  REGION 1..139: note = Synthetic polypeptide
EVQLLESGGGLVQPGGSLRLSCAASGFTFSKYSMAWVRQAPGKGLEWVSGIYPSGGRTLYADSVKGRFTISRDNSKNTLYLQMNSLRAEDTAVYYCAYRRTGIPRRDAFDIWGQGTMVTVSSASTKGPSVFPLAPSSKS

SEQ ID NO: 1706 - protein, 107 aa, synthetic construct; identical to SEQ ID NO: 279
  REGION 1..107: note = Synthetic polypeptide

SEQ ID NO: 1707 - protein, 139 aa, synthetic construct
  REGION 1..139: note = Synthetic polypeptide
EVQLLESGGGLVQPGGSLRLSCAASGFTFSRYSMSWVRQAPGKGLEWVSGISPSGGETSYADSVKGRFTISRDNSKNTLYLQMNSLRAEDTAVYYCAYRRTGIPRRDAFDIWGQGTMVTVSSASTKGPSVFPLAPSSKS

SEQ ID NO: 1708 - protein, 107 aa, synthetic construct; identical to SEQ ID NO: 279
  REGION 1..107: note = Synthetic polypeptide

SEQ ID NO: 1709 - protein, 139 aa, synthetic construct
  REGION 1..139: note = Synthetic polypeptide
EVQLLESGGGLVQPGGSLRLSCAASGFTFSRYKMYWVRQAPGKGLEWVSVIGPSGGATFYADSVKGRFTISRDNSKNTLYLQMNSLRAEDTAVYYCAYRRTGIPRRDAFDIWGQGTMVTVSSASTKGPSVFPLAPSSKS

SEQ ID NO: 1710 - protein, 107 aa, synthetic construct; identical to SEQ ID NO: 279
  REGION 1..107: note = Synthetic polypeptide

SEQ ID NO: 1711 - protein, 139 aa, synthetic construct
  REGION 1..139: note = Synthetic polypeptide
EVQLLESGGGLVQPGGSLRLSCAASGFTFSQYFMHWVRQAPGKGLEWVSYIYPSGGMTEYADSVKGRFTISRDNSKNTLYLQMNSLRAEDTAVYYCAYRRTGIPRRDAFDIWGQGTMVTVSSASTKGPSVFPLAPSSKS

SEQ ID NO: 1712 - protein, 107 aa, synthetic construct; identical to SEQ ID NO: 279
  REGION 1..107: note = Synthetic polypeptide

SEQ ID NO: 1713 - protein, 139 aa, synthetic construct
  REGION 1..139: note = Synthetic polypeptide
EVQLLESGGGLVQPGGSLRLSCAASGFTFSIYTMYWVRQAPGKGLEWVSSISPSGGWTYYADSVKGRFTISRDNSKNTLYLQMNSLRAEDTAVYYCAYRRTGIPRRDAFDIWGQGTMVTVSSASTKGPSVFPLAPSSKS

SEQ ID NO: 1714 - protein, 107 aa, synthetic construct; identical to SEQ ID NO: 279
  REGION 1..107: note = Synthetic polypeptide

SEQ ID NO: 1715 - protein, 140 aa, synthetic construct
  REGION 1..140: note = Synthetic polypeptide
EVQLLESGGGLVQPGGSLRLSCAASGFTFSHYMGMNWVRQAPGKGLEWVSSIVPSGGWTQYADSVKGRFTISRDNSKNTLYLQMNSLRAEDTAVYYCAYRRTGIPRRDAFDIWGQGTMVTVSSASTKGPSVFPLAPSSKS

SEQ ID NO: 1716 - protein, 107 aa, synthetic construct; identical to SEQ ID NO: 279
  REGION 1..107: note = Synthetic polypeptide

SEQ ID NO: 1717 - protein, 139 aa, synthetic construct
  REGION 1..139: note = Synthetic polypeptide
EVQLLESGGGLVQPGGSLRLSCAASGFTFSLYVMYWVRQAPGKGLEWVSYIVPSGGPTAYADSVKGRFTISRDNSKNTLYLQMNSLRAEDTAVYYCAYRRTGIPRRDAFDIWGQGTMVTVSSASTKGPSVFPLAPSSKS

SEQ ID NO: 1718 - protein, 107 aa, synthetic construct; identical to SEQ ID NO: 279
  REGION 1..107: note = Synthetic polypeptide

SEQ ID NO: 1719 - protein, 139 aa, synthetic construct
  REGION 1..139: note = Synthetic polypeptide
EVQLLESGGGLVQPGGSLRLSCAASGFTFSIYSMYWVRQAPGKGLEWVSYIRPSGGNTKYADSVKGRFTISRDNSKNTLYLQMNSLRAEDTAVYYCAYRRTGIPRRDAFDIWGQGTMVTVSSASTKGPSVFPLAPSSKS

SEQ ID NO: 1720 - protein, 107 aa, synthetic construct; identical to SEQ ID NO: 279
  REGION 1..107: note = Synthetic polypeptide

SEQ ID NO: 1721 - protein, 139 aa, synthetic construct
  REGION 1..139: note = Synthetic polypeptide
EVQLLESGGGLVQPGGSLRLSCAASGFTFSIYDMNWVRQAPGKGLEWVSSIYPSGGRTRYADSVKGRFTISRDNSKNTLYLQMNSLRAEDTAVYYCAYRRTGIPRRDAFDIWGQGTMVTVSSASTKGPSVFPLAPSSKS

SEQ ID NO: 1722 - protein, 107 aa, synthetic construct; identical to SEQ ID NO: 279
  REGION 1..107: note = Synthetic polypeptide

SEQ ID NO: 1723 - protein, 139 aa, synthetic construct
  REGION 1..139: note = Synthetic polypeptide
EVQLLESGGGLVQPGGSLRLSCAASGFTFSTYSMYWVRQAPGKGLEWVSSIYPSGGLTWYADSVKGRFTISRDNSKNTLYLQMNSLRAEDTAVYYCAYRRTGIPRRDAFDIWGQGTMVTVSSASTKGPSVFPLAPSSKS

SEQ ID NO: 1724 - protein, 107 aa, synthetic construct; identical to SEQ ID NO: 279
  REGION 1..107: note = Synthetic polypeptide

SEQ ID NO: 1725 - protein, 139 aa, synthetic construct
  REGION 1..139: note = Synthetic polypeptide
EVQLLESGGGLVQPGGSLRLSCAASGFTFSIYDMWWVRQAPGKGLEWVSSIRPSGGITKYADSVKGRFTISRDNSKNTLYLQMNSLRAEDTAVYYCAYRRTGIPRRDAFDIWGQGTMVTVSSASTKGPSVFPLAPSSKS

SEQ ID NO: 1726 - protein, 107 aa, synthetic construct; identical to SEQ ID NO: 279
  REGION 1..107: note = Synthetic polypeptide

SEQ ID NO: 1727 - protein, 139 aa, synthetic construct
  REGION 1..139: note = Synthetic polypeptide
EVQLLESGGGLVQPGGSLRLSCAASGFTFSVYSMWWVRQAPGKGLEWVSSISSSGGMTEYADSVKGRFTISRDNSKNTLYLQMNSLRAEDTAVYYCAYRRTGIPRRDAFDIWGQGTMVTVSSASTKGPSVFPLAPSSKS

SEQ ID NO: 1728 - protein, 107 aa, synthetic construct; identical to SEQ ID NO: 279
  REGION 1..107: note = Synthetic polypeptide

SEQ ID NO: 1729 - protein, 139 aa, synthetic construct
  REGION 1..139: note = Synthetic polypeptide
EVQLLESGGGLVQPGGSLRLSCAASGFTFSVYNMHWVRQAPGKGLEWVSSIYPSGGMTYYADSVKGRFTISRDNSKNTLYLQMNSLRAEDTAVYYCAYRRTGIPRRDAFDIWGQGTMVTVSSASTKGPSVFPLAPSSKS

SEQ ID NO: 1730 - protein, 107 aa, synthetic construct; identical to SEQ ID NO: 279
  REGION 1..107: note = Synthetic polypeptide

SEQ ID NO: 1731 - protein, 139 aa, synthetic construct
  REGION 1..139: note = Synthetic polypeptide
EVQLLESGGGLVQPGGSLRLSCAASGFTFSIYTMMWVRQAPGKGLEWVSSIWSSGGQTKYADSVKGRFTISRDNSKNTLYLQMNSLRAEDTAVYYCAYRRTGIPRRDAFDIWGQGTMVTVSSASTKGPSVFPLAPSSKS

SEQ ID NO: 1732 - protein, 107 aa, synthetic construct; identical to SEQ ID NO: 279
  REGION 1..107: note = Synthetic polypeptide

SEQ ID NO: 1733 - protein, 137 aa, synthetic construct
  REGION 1..137: note = Synthetic polypeptide
EVQLLESGGGLVQPGGSLRLSCAASGFTFSQYTMVWVRQAPGKGLEWVSWIYSSRANYADSVKGRFTISRDNSKNTLYLQMNSLRAEDTAVYYCAYRRTGIPRRDAFDIWGQGTMVTVSSASTKGPSVFPLAPSSKS

SEQ ID NO: 1734 - protein, 107 aa, synthetic construct; identical to SEQ ID NO: 279
  REGION 1..107: note = Synthetic polypeptide

SEQ ID NO: 1735 - protein, 139 aa, synthetic construct
  REGION 1..139: note = Synthetic polypeptide
EVQLLESGGGLVQPGGSLRLSCAASGFTFSIYDMTWVRQAPGKGLEWVSSIYPSGGQTIYADSVKGRFTISRDNSKNTLYLQMNSLRAEDTAVYYCAYRRTGIPRRDAFDIWGQGTMVTVSSASTKGPSVFPLAPSSKS

SEQ ID NO: 1736 - protein, 107 aa, synthetic construct; identical to SEQ ID NO: 279
  REGION 1..107: note = Synthetic polypeptide

SEQ ID NO: 1737 - protein, 138 aa, synthetic construct
  REGION 1..138: note = Synthetic polypeptide
EVQLLESGGGLVQPGGSLRLSCAASGFTFSPYNMYWVRQAPGKGLEWVSWIVPGGVTKYADSVKGRFTISRDNSKNTLYLQMNSLRAEDTAVYYCAYRRTGIPRRDAFDIWGQGTMVTVSSASTKGPSVFPLAPSSKS

SEQ ID NO: 1738 - protein, 107 aa, synthetic construct; identical to SEQ ID NO: 279
  REGION 1..107: note = Synthetic polypeptide

SEQ ID NO: 1739 - protein, 139 aa, synthetic construct
  REGION 1..139: note = Synthetic polypeptide
EVQLLESGGGLVQPGGSLRLSCAASGFTFSIYDMYWVRQAPGKGLEWVSSIGPSGGPTAYADSVKGRFTISRDNSKNTLYLQMNSLRAEDTAVYYCAYRRTGIPRRDAFDIWGQGTMVTVSSASTKGPSVFPLAPSSKS

SEQ ID NO: 1740 - protein, 107 aa, synthetic construct; identical to SEQ ID NO: 279
  REGION 1..107: note = Synthetic polypeptide

SEQ ID NO: 1741 - protein, 139 aa, synthetic construct
  REGION 1..139: note = Synthetic polypeptide
EVQLLESGGGLVQPGGSLRLSCAASGFTFSIYLMIWVRQAPGKGLEWVSYIGPSGGPTEYADSVKGRFTISRDNSKNTLYLQMNSLRAEDTAVYYCAYRRTGIPRRDAFDIWGQGTMVTVSSASTKGPSVFPLAPSSKS

SEQ ID NO: 1742 - protein, 107 aa, synthetic construct; identical to SEQ ID NO: 279
  REGION 1..107: note = Synthetic polypeptide

SEQ ID NO: 1743 - protein, 139 aa, synthetic construct
  REGION 1..139: note = Synthetic polypeptide
EVQLLESGGGLVQPGGSLRLSCAASGFTFSHYIMMWVRQAPGKGLEWVSGIYSSGGITVYADSVKGRFTISRDNSKNTLYLQMNSLRAEDTAVYYCAYRRIGVPRRDEFDIWGQGTMVTVSSASTKGPSVFPLAPSSKS

SEQ ID NO: 1744 - protein, 107 aa, synthetic construct; identical to SEQ ID NO: 279
  REGION 1..107: note = Synthetic polypeptide

SEQ ID NO: 1745 - protein, 139 aa, synthetic construct
  REGION 1..139: note = Synthetic polypeptide
EVQLLESGGGLVQPGGSLRLSCAASGFTFSHYIMMWVRQAPGKGLEWVSGIYSSGGITVYADSVKGRFTISRDNSKNTLYLQMNSLRAEDTAVYYCAYRRRGIPRRDAFDIWGQGTMVTVSSASTKGPSVFPLAPSSKS

SEQ ID NO: 1746 - protein, 107 aa, synthetic construct; identical to SEQ ID NO: 279
  REGION 1..107: note = Synthetic polypeptide

SEQ ID NO: 1747 - protein, 139 aa, synthetic construct
  REGION 1..139: note = Synthetic polypeptide
EVQLLESGGGLVQPGGSLRLSCAASGFTFSHYIMMWVRQAPGKGLEWVSGIYSSGGITVYADSVKGRFTISRDNSKNTLYLQMNSLRAEDTAVYYCAFRRTGIPRRDAFDNWGQGTMVTVSSASTKGPSVFPLAPSSKS

SEQ ID NO: 1748 - protein, 107 aa, synthetic construct; identical to SEQ ID NO: 279
  REGION 1..107: note = Synthetic polypeptide

SEQ ID NO: 1749 - protein, 139 aa, synthetic construct
  REGION 1..139: note = Synthetic polypeptide
EVQLLESGGGLVQPGGSLRLSCAASGFTFSHYIMMWVRQAPGKGLEWVSGIYSSGGITVYADSVKGRFTISRDNSKNTLYLQMNSLRAEDTAVYYCAYRRTGVPRRDSFDIWGQGTMVTVSSASTKGPSVFPLAPSSKS

SEQ ID NO: 1750 - protein, 107 aa, synthetic construct; identical to SEQ ID NO: 279
  REGION 1..107: note = Synthetic polypeptide

SEQ ID NO: 1751 - protein, 139 aa, synthetic construct
  REGION 1..139: note = Synthetic polypeptide
EVQLLESGGGLVQPGGSLRLSCAASGFTFSHYIMMWVRQAPGKGLEWVSGIYSSGGITVYADSVKGRFTISRDNSKNTLYLQMNSLRAEDTAVYYCAYRRTGIPRRDAFDSWGQGTMVTVSSASTKGPSVFPLAPSSKS

SEQ ID NO: 1752 - protein, 107 aa, synthetic construct; identical to SEQ ID NO: 279
  REGION 1..107: note = Synthetic polypeptide

SEQ ID NO: 1753 - protein, 139 aa, synthetic construct
  REGION 1..139: note = Synthetic polypeptide
EVQLLESGGGLVQPGGSLRLSCAASGFTFSHYIMMWVRQAPGKGLEWVSGIYSSGGITVYADSVKGRFTISRDNSKNTLYLQMNSLRAEDTAVYYCAWRRIGVPRRDSFDMWGQGTMVTVSSASTKGPSVFPLAPSSKS

SEQ ID NO: 1754 - protein, 107 aa, synthetic construct; identical to SEQ ID NO: 279
  REGION 1..107: note = Synthetic polypeptide

SEQ ID NO: 1755 - protein, 139 aa, synthetic construct
  REGION 1..139: note = Synthetic polypeptide
EVQLLESGGGLVQPGGSLRLSCAASGFTFSHYIMMWVRQAPGKGLEWVSGIYSSGGITVYADSVKGRFTISRDNSKNTLYLQMNSLRAEDTAVYYCAYRRTGVPRRDAFDNWGQGTMVTVSSASTKGPSVFPLAPSSKS

SEQ ID NO: 1756 - protein, 107 aa, synthetic construct; identical to SEQ ID NO: 279
  REGION 1..107: note = Synthetic polypeptide

SEQ ID NO: 1757 - protein, 139 aa, synthetic construct
  REGION 1..139: note = Synthetic polypeptide
EVQLLESGGGLVQPGGSLRLSCAASGFTFSHYIMMWVRQAPGKGLEWVSGIYSSGGITVYADSVKGRFTISRDNSKNTLYLQMNSLRAEDTAVYYCAYRRMGIPRRNAFDIWGQGTMVTVSSASTKGPSVFPLAPSSKS

SEQ ID NO: 1758 - protein, 107 aa, synthetic construct; identical to SEQ ID NO: 279
  REGION 1..107: note = Synthetic polypeptide

SEQ ID NO: 1759 - protein, 139 aa, synthetic construct
  REGION 1..139: note = Synthetic polypeptide
EVQLLESGGGLVQPGGSLRLSCAASGFTFSHYIMMWVRQAPGKGLEWVSGIYSSGGITVYADSVKGRFTISRDNSKNTLYLQMNSLRAEDTAVYYCAYRRTGVPRRNAFDNWGQGTMVTVSSASTKGPSVFPLAPSSKS

SEQ ID NO: 1760 - protein, 107 aa, synthetic construct; identical to SEQ ID NO: 279
  REGION 1..107: note = Synthetic polypeptide

SEQ ID NO: 1761 - protein, 139 aa, synthetic construct
  REGION 1..139: note = Synthetic polypeptide
EVQLLESGGGLVQPGGSLRLSCAASGFTFSHYIMMWVRQAPGKGLEWVSGIYSSGGITVYADSVKGRFTISRDNSKNTLYLQMNSLRAEDTAVYYCAYRRTGIPRRDVFDIWGQGTMVTVSSASTKGPSVFPLAPSSKS

SEQ ID NO: 1762 - protein, 107 aa, synthetic construct; identical to SEQ ID NO: 279
  REGION 1..107: note = Synthetic polypeptide

SEQ ID NO: 1763 - protein, 139 aa, synthetic construct
  REGION 1..139: note = Synthetic polypeptide
EVQLLESGGGLVQPGGSLRLSCAASGFTFSHYIMMWVRQAPGKGLEWVSGIYSSGGITVYADSVKGRFTISRDNSKNTLYLQMNSLRAEDTAVYYCAYRRTGVPRRDEFDIWGQGTMVTVSSASTKGPSVFPLAPSSKS

SEQ ID NO: 1764 - protein, 107 aa, synthetic construct; identical to SEQ ID NO: 279
  REGION 1..107: note = Synthetic polypeptide

SEQ ID NO: 1765 - protein, 139 aa, synthetic construct
  REGION 1..139: note = Synthetic polypeptide
EVQLLESGGGLVQPGGSLRLSCAASGFTFSHYIMMWVRQAPGKGLEWVSGIYSSGGITVYADSVKGRFTISRDNSKNTLYLQMNSLRAEDTAVYYCAYRRSGIPRRDAFDIWGQGTMVTVSSASTKGPSVFPLAPSSKS

SEQ ID NO: 1766 - protein, 107 aa, synthetic construct; identical to SEQ ID NO: 279
  REGION 1..107: note = Synthetic polypeptide

SEQ ID NO: 1767 - protein, 139 aa, synthetic construct
  REGION 1..139: note = Synthetic polypeptide
EVQLLESGGGLVQPGGSLRLSCAASGFTFSHYIMMWVRQAPGKGLEWVSGIYSSGGITVYADSVKGRFTISRDNSKNTLYLQMNSLRAEDTAVYYCAYRRTGVPRRDAFDIWGQGTMVTVSSASTKGPSVFPLAPSSKS

SEQ ID NO: 1768 - protein, 107 aa, synthetic construct; identical to SEQ ID NO: 279
  REGION 1..107: note = Synthetic polypeptide

SEQ ID NO: 1769 - protein, 139 aa, synthetic construct
  REGION 1..139: note = Synthetic polypeptide
EVQLLESGGGLVQPGGSLRLSCAASGFTFSHYIMMWVRQAPGKGLEWVSGIYSSGGITVYADSVKGRFTISRDNSKNTLYLQMNSLRAEDTAVYYCAYRRTGVPRRDALDNWGQGTMVTVSSASTKGPSVFPLAPSSKS

SEQ ID NO: 1770 - protein, 107 aa, synthetic construct; identical to SEQ ID NO: 279
  REGION 1..107: note = Synthetic polypeptide

SEQ ID NO: 1771 - protein, 139 aa, synthetic construct
  REGION 1..139: note = Synthetic polypeptide
EVQLLESGGGLVQPGGSLRLSCAASGFTFSHYIMMWVRQAPGKGLEWVSGIYSSGGITVYADSVKGRFTISRDNSKNTLYLQMNSLRAEDTAVYYCAYRRIGVPRRDAFDIWGQGTMVTVSSASTKGPSVFPLAPSSKS

SEQ ID NO: 1772 - protein, 107 aa, synthetic construct; identical to SEQ ID NO: 279
  REGION 1..107: note = Synthetic polypeptide

SEQ ID NO: 1773 - protein, 139 aa, synthetic construct
  REGION 1..139: note = Synthetic polypeptide
EVQLLESGGGLVQPGGSLRLSCAASGFTFSHYIMMWVRQAPGKGLEWVSGIYSSGGITVYADSVKGRFTISRDNSKNTLYLQMNSLRAEDTAVYYCAYRRKGIPRRDDFDIWGQGTMVTVSSASTKGPSVFPLAPSSKS

SEQ ID NO: 1774 - protein, 107 aa, synthetic construct; identical to SEQ ID NO: 279
  REGION 1..107: note = Synthetic polypeptide

SEQ ID NO: 1775 - protein, 139 aa, synthetic construct
  REGION 1..139: note = Synthetic polypeptide
EVQLLESGGGLVQPGGSLRLSCAASGFTFSHYIMMWVRQAPGKGLEWVSGIYSSGGITVYADSVKGRFTISRDNSKNTLYLQMNSLRAEDTAVYYCAYRRTGIPRWDAFDIWGQGTMVTVSSASTKGPSVFPLAPSSKS

SEQ ID NO: 1776 - protein, 107 aa, synthetic construct; identical to SEQ ID NO: 279
  REGION 1..107: note = Synthetic polypeptide

SEQ ID NO: 1777 - protein, 139 aa, synthetic construct
  REGION 1..139: note = Synthetic polypeptide
EVQLLESGGGLVQPGGSLRLSCAASGFTFSHYIMMWVRQAPGKGLEWVSGIYSSGGITVYADSVKGRFTISRDNSKNTLYLQMNSLRAEDTAVYYCAFRRTGIPRRDSFDIWGQGTMVTVSSASTKGPSVFPLAPSSKS

SEQ ID NO: 1778 - protein, 107 aa, synthetic construct; identical to SEQ ID NO: 279
  REGION 1..107: note = Synthetic polypeptide

SEQ ID NO: 1779 - protein, 139 aa, synthetic construct
  REGION 1..139: note = Synthetic polypeptide
EVQLLESGGGLVQPGGSLRLSCAASGFTFSHYIMMWVRQAPGKGLEWVSGIYSSGGITVYADSVKGRFTISRDNSKNTLYLQMNSLRAEDTAVYYCAYQRTGVPRRDSFNIWGQGTMVTVSSASTKGPSVFPLAPSSKS

SEQ ID NO: 1780 - protein, 107 aa, synthetic construct; identical to SEQ ID NO: 279
  REGION 1..107: note = Synthetic polypeptide

SEQ ID NO: 1781 - protein, 139 aa, synthetic construct
  REGION 1..139: note = Synthetic polypeptide
EVQLLESGGGLVQPGGSLRLSCAASGFTFSHYIMMWVRQAPGKGLEWVSGIYSSGGITVYADSVKGRFTISRDNSKNTLYLQMNSLRAEDTAVYYCAYRRTGVPRRDDFDIWGQGTMVTVSSASTKGPSVFPLAPSSKS

SEQ ID NO: 1782 - protein, 107 aa, synthetic construct; identical to SEQ ID NO: 279
  REGION 1..107: note = Synthetic polypeptide

SEQ ID NO: 1783 - protein, 139 aa, synthetic construct
  REGION 1..139: note = Synthetic polypeptide
EVQLLESGGGLVQPGGSLRLSCAASGFTFSHYIMMWVRQAPGKGLEWVSGIYSSGGITVYADSVKGRFTISRDNSKNTLYLQMNSLRAEDTAVYYCAYRRSGVPRRDDFDIWGQGTMVTVSSASTKGPSVFPLAPSSKS

SEQ ID NO: 1784 - protein, 107 aa, synthetic construct; identical to SEQ ID NO: 279
  REGION 1..107: note = Synthetic polypeptide

SEQ ID NO: 1785 - protein, 139 aa, synthetic construct
  REGION 1..139: note = Synthetic polypeptide
EVQLLESGGGLVQPGGSLRLSCAASGFTFSHYIMMWVRQAPGKGLEWVSGIYSSGGITVYADSVKGRFTISRDNSKNTLYLQMNSLRAEDTAVYYCAYRRTGVPRWDDFDIWGQGTMVTVSSASTKGPSVFPLAPSSKS

SEQ ID NO: 1786 - protein, 107 aa, synthetic construct; identical to SEQ ID NO: 279
  REGION 1..107: note = Synthetic polypeptide

SEQ ID NO: 1787 - protein, 139 aa, synthetic construct
  REGION 1..139: note = Synthetic polypeptide
EVQLLESGGGLVQPGGSLRLSCAASGFTFSHYIMMWVRQAPGKGLEWVSGIYSSGGITVYADSVKGRFTISRDNSKNTLYLQMNSLRAEDTAVYYCAYRRPGVPRRDAFDIWGQGTMVTVSSASTKGPSVFPLAPSSKS

SEQ ID NO: 1788 - protein, 107 aa, synthetic construct; identical to SEQ ID NO: 279
  REGION 1..107: note = Synthetic polypeptide

SEQ ID NO: 1789 - protein, 139 aa, synthetic construct
  REGION 1..139: note = Synthetic polypeptide
EVQLLESGGGLVQPGGSLRLSCAASGFTFSHYIMMWVRQAPGKGLEWVSGIYSSGGITVYADSVKGRFTISRDNSKNTLYLQMNSLRAEDTAVYYCAYRRIGVPRRDDFDIWGQGTMVTVSSASTKGPSVFPLAPSSKS

SEQ ID NO: 1790 - protein, 107 aa, synthetic construct; identical to SEQ ID NO: 279
  REGION 1..107: note = Synthetic polypeptide

SEQ ID NO: 1791 - protein, 139 aa, synthetic construct
  REGION 1..139: note = Synthetic polypeptide
EVQLLESGGGLVQPGGSLRLSCAASGFTFSHYIMMWVRQAPGKGLEWVSGIYSSGGITVYADSVKGRFTISRDNSKNTLYLQMNSLRAEDTAVYYCAYRRIGVPRRDSFDIWGQGTMVTVSSASTKGPSVFPLAPSSKS

SEQ ID NO: 1792 - protein, 107 aa, synthetic construct; identical to SEQ ID NO: 279
  REGION 1..107: note = Synthetic polypeptide

SEQ ID NO: 1793 - protein, 139 aa, synthetic construct
  REGION 1..139: note = Synthetic polypeptide
EVQLLESGGGLVQPGGSLRLSCAASGFTFSHYIMMWVRQAPGKGLEWVSGIYSSGGITVYADSVKGRFTISRDNSKNTLYLQMNSLRAEDTAVYYCAYRRTGIPRRDAFEIWGQGTMVTVSSASTKGPSVFPLAPSSKS

SEQ ID NO: 1794 - protein, 107 aa, synthetic construct; identical to SEQ ID NO: 279
  REGION 1..107: note = Synthetic polypeptide

SEQ ID NO: 1795 - protein, 139 aa, synthetic construct
  REGION 1..139: note = Synthetic polypeptide
EVQLLESGGGLVQPGGSLRLSCAASGFTFSHYIMMWVRQAPGKGLEWVSGIYSSGGITVYADSVKGRFTISRDNSKNTLYLQMNSLRAEDTAVYYCAYRRRGVPRRDDFDIWGQGTMVTVSSASTKGPSVFPLAPSSKS

SEQ ID NO: 1796 - protein, 107 aa, synthetic construct; identical to SEQ ID NO: 279
  REGION 1..107: note = Synthetic polypeptide

SEQ ID NO: 1797 - protein, 139 aa, synthetic construct
  REGION 1..139: note = Synthetic polypeptide
EVQLLESGGGLVQPGGSLRLSCAASGFTFSHYIMMWVRQAPGKGLEWVSGIYSSGGITVYADSVKGRFTISRDNSKNTLYLQMNSLRAEDTAVYYCAYRRTGVPRWDAFDIWGQGTMVTVSSASTKGPSVFPLAPSSKS

SEQ ID NO: 1798 - protein, 107 aa, synthetic construct; identical to SEQ ID NO: 279
  REGION 1..107: note = Synthetic polypeptide

SEQ ID NO: 1799 - protein, 139 aa, synthetic construct
  REGION 1..139: note = Synthetic polypeptide
EVQLLESGGGLVQPGGSLRLSCAASGFTFSHYIMMWVRQAPGKGLEWVSGIYSSGGITVYADSVKGRFTISRDNSKNTLYLQMNSLRAEDTAVYYCAFRRTGVPRRDSFEIWGQGTMVTVSSASTKGPSVFPLAPSSKS

SEQ ID NO: 1800 - protein, 107 aa, synthetic construct; identical to SEQ ID NO: 279
  REGION 1..107: note = Synthetic polypeptide

SEQ ID NO: 1801 - protein, 139 aa, synthetic construct
  REGION 1..139: note = Synthetic polypeptide
EVQLLESGGGLVQPGGSLRLSCAASGFTFSHYIMMWVRQAPGKGLEWVSGIYSSGGITVYADSVKGRFTISRDNSKNTLYLQMNSLRAEDTAVYYCAFRRTGVPRWDDFDIWGQGTMVTVSSASTKGPSVFPLAPSSKS

SEQ ID NO: 1802 - protein, 107 aa, synthetic construct; identical to SEQ ID NO: 279
  REGION 1..107: note = Synthetic polypeptide

SEQ ID NO: 1803 - protein, 139 aa, synthetic construct
  REGION 1..139: note = Synthetic polypeptide
EVQLLESGGGLVQPGGSLRLSCAASGFTFSHYIMMWVRQAPGKGLEWVSGIYSSGGITVYADSVKGRFTISRDNSKNTLYLQMNSLRAEDTAVYYCAFRRTGVPRRDVFDIWGQGTMVTVSSASTKGPSVFPLAPSSKS

SEQ ID NO: 1804 - protein, 12 aa, synthetic construct
  REGION 1..12: note = Synthetic peptide
RTSQFVNSNYLA

SEQ ID NO: 1805 - protein, 7 aa, synthetic construct
  REGION 1..7: note = Synthetic peptide
GASSRAT

SEQ ID NO: 1806 - protein, 9 aa, synthetic construct
  REGION 1..9: note = Synthetic peptide
QQSSRTPWT

SEQ ID NO: 1807 - protein, 5 aa, synthetic construct
  REGION 1..5: note = Synthetic peptide
HYLMT

SEQ ID NO: 1808 - protein, 17 aa, synthetic construct
  REGION 1..17: note = Synthetic peptide
YISPSGGHTIYADSVKG

SEQ ID NO: 1809 - protein, 16 aa, synthetic construct
  REGION 1..16: note = Synthetic peptide
VARGIAARSRTSYLDQ

SEQ ID NO: 1810 - protein, 12 aa, synthetic construct
  REGION 1..12: note = Synthetic peptide
RTSQFVNSNYLA

SEQ ID NO: 1811 - protein, 7 aa, synthetic construct
  REGION 1..7: note = Synthetic peptide
GASSRAT

SEQ ID NO: 1812 - protein, 9 aa, synthetic construct
  REGION 1..9: note = Synthetic peptide
QQSSRTPWT

SEQ ID NO: 1813 - protein, 5 aa, synthetic construct
  REGION 1..5: note = Synthetic peptide
HYLMT

SEQ ID NO: 1814 - protein, 17 aa, synthetic construct
  REGION 1..17: note = Synthetic peptide
YISPSGGHTIYADSVKG

SEQ ID NO: 1815 - protein, 16 aa, synthetic construct
  REGION 1..16: note = Synthetic peptide
VGQGIRGRSRTSYFAQ

SEQ ID NO: 1816 - protein, 12 aa, synthetic construct
  REGION 1..12: note = Synthetic peptide
RTSQFVNSNYLA

SEQ ID NO: 1817 - protein, 7 aa, synthetic construct
  REGION 1..7: note = Synthetic peptide
GASSRAT

SEQ ID NO: 1818 - protein, 9 aa, synthetic construct
  REGION 1..9: note = Synthetic peptide
QQSSRTPWT

SEQ ID NO: 1819 - protein, 5 aa, synthetic construct
  REGION 1..5: note = Synthetic peptide
DYMMA

SEQ ID NO: 1820 - protein, 17 aa, synthetic construct
  REGION 1..17: note = Synthetic peptide
SIVPSGGHTHYADSVKG

SEQ ID NO: 1821 - protein, 16 aa, synthetic construct
  REGION 1..16: note = Synthetic peptide
VARGIAARSRTSYFDY

SEQ ID NO: 1822 - protein, 12 aa, synthetic construct
  REGION 1..12: note = Synthetic peptide
RTSQFVNSNYLA

SEQ ID NO: 1823 - protein, 7 aa, synthetic construct
  REGION 1..7: note = Synthetic peptide
GASSRAT

SEQ ID NO: 1824 - protein, 9 aa, synthetic construct
  REGION 1..9: note = Synthetic peptide
QQSSRTPWT

SEQ ID NO: 1825 - protein, 5 aa, synthetic construct
  REGION 1..5: note = Synthetic peptide
HYLMT

SEQ ID NO: 1826 - protein, 17 aa, synthetic construct
  REGION 1..17: note = Synthetic peptide
YISPSGGHTIYADSVKG

SEQ ID NO: 1827 - protein, 16 aa, synthetic construct
  REGION 1..16: note = Synthetic peptide
VAQGIAARSRTSSVDQ

SEQ ID NO: 1828 - protein, 12 aa, synthetic construct
  REGION 1..12: note = Synthetic peptide
RTSQFVNSNYLA

SEQ ID NO: 1829 - protein, 7 aa, synthetic construct
  REGION 1..7: note = Synthetic peptide
GASSRAT

SEQ ID NO: 1830 - protein, 9 aa, synthetic construct
  REGION 1..9: note = Synthetic peptide
QQSSRTPWT

SEQ ID NO: 1831 - protein, 5 aa, synthetic construct
  REGION 1..5: note = Synthetic peptide
HYLMT

SEQ ID NO: 1832 - protein, 17 aa, synthetic construct
  REGION 1..17: note = Synthetic peptide
YISPSGGHTIYADSVKG

SEQ ID NO: 1833 - protein, 16 aa, synthetic construct
  REGION 1..16: note = Synthetic peptide
VARGIAARSRTSFFDY

SEQ ID NO: 1834 - protein, 12 aa, synthetic construct
  REGION 1..12: note = Synthetic peptide
RTSQFVNSNYLA

SEQ ID NO: 1835 - protein, 7 aa, synthetic construct
  REGION 1..7: note = Synthetic peptide
GASSRAT

SEQ ID NO: 1836 - protein, 9 aa, synthetic construct
  REGION 1..9: note = Synthetic peptide
QQSSRTPWT

SEQ ID NO: 1837 - protein, 5 aa, synthetic construct
  REGION 1..5: note = Synthetic peptide
QYLMA

SEQ ID NO: 1838 - protein, 17 aa, synthetic construct
  REGION 1..17: note = Synthetic peptide
SIYPSGGWTKYADSVKG

SEQ ID NO: 1839 - protein, 16 aa, synthetic construct
  REGION 1..16: note = Synthetic peptide
VARGIAARSRTSYFDY

SEQ ID NO: 1840 - protein, 12 aa, synthetic construct
  REGION 1..12: note = Synthetic peptide
RTSQFVNSNYLA

SEQ ID NO: 1841 - protein, 7 aa, synthetic construct
  REGION 1..7: note = Synthetic peptide
GASSRAT

SEQ ID NO: 1842 - protein, 9 aa, synthetic construct
  REGION 1..9: note = Synthetic peptide
QQSSRTPWT

SEQ ID NO: 1843 - protein, 5 aa, synthetic construct
  REGION 1..5: note = Synthetic peptide
HYLMT

SEQ ID NO: 1844 - protein, 17 aa, synthetic construct
  REGION 1..17: note = Synthetic peptide
YISPSGGHTIYADSVKG

SEQ ID NO: 1845 - protein, 16 aa, synthetic construct
  REGION 1..16: note = Synthetic peptide
VARGIASRSRTRYCDY

SEQ ID NO: 1846 - protein, 12 aa, synthetic construct
  REGION 1..12: note = Synthetic peptide
RTSQFVNSNYLA

SEQ ID NO: 1847 - protein, 7 aa, synthetic construct
  REGION 1..7: note = Synthetic peptide
GASSRAT

SEQ ID NO: 1848 - protein, 9 aa, synthetic construct
  REGION 1..9: note = Synthetic peptide
QQSSRTPWT

SEQ ID NO: 1849 - protein, 5 aa, synthetic construct
  REGION 1..5: note = Synthetic peptide
HYLMT

SEQ ID NO: 1850 - protein, 17 aa, synthetic construct
  REGION 1..17: note = Synthetic peptide
YISPSGGHTIYADSVKG

SEQ ID NO: 1851 - protein, 16 aa, synthetic construct
  REGION 1..16: note = Synthetic peptide
VATGIVARSRTRYFDQ

SEQ ID NO: 1852 - protein, 12 aa, synthetic construct
  REGION 1..12: note = Synthetic peptide
RTSQFVNSNYLA

SEQ ID NO: 1853 - protein, 7 aa, synthetic construct
  REGION 1..7: note = Synthetic peptide
GASSRAT

SEQ ID NO: 1854 - protein, 9 aa, synthetic construct
  REGION 1..9: note = Synthetic peptide
QQSSRTPWT

SEQ ID NO: 1855 - protein, 5 aa, synthetic construct
  REGION 1..5: note = Synthetic peptide
HYLMT

SEQ ID NO: 1856 - protein, 17 aa, synthetic construct
  REGION 1..17: note = Synthetic peptide
YISPSGGHTIYADSVKG

SEQ ID NO: 1857 - protein, 16 aa, synthetic construct
  REGION 1..16: note = Synthetic peptide
VARGIAARSRTRYFDY

SEQ ID NO: 1858 - protein, 12 aa, synthetic construct
  REGION 1..12: note = Synthetic peptide
RTSQFVNSNYLA

SEQ ID NO: 1859 - protein, 7 aa, synthetic construct
  REGION 1..7: note = Synthetic peptide
GASSRAT

SEQ ID NO: 1860 - protein, 9 aa, synthetic construct
  REGION 1..9: note = Synthetic peptide
QQSSRTPWT

SEQ ID NO: 1861 - protein, 5 aa, synthetic construct
  REGION 1..5: note = Synthetic peptide
HYLMT

SEQ ID NO: 1862 - protein, 17 aa, synthetic construct
  REGION 1..17: note = Synthetic peptide
YISPSGGHTIYADSVKG

SEQ ID NO: 1863 - protein, 16 aa, synthetic construct
  REGION 1..16: note = Synthetic peptide
VAQGISARSRTSYFDY

SEQ ID NO: 1864 - protein, 12 aa, synthetic construct
  REGION 1..12: note = Synthetic peptide
RTSQFVNSNYLA

SEQ ID NO: 1865 - protein, 7 aa, synthetic construct
  REGION 1..7: note = Synthetic peptide
GASSRAT

SEQ ID NO: 1866 - protein, 9 aa, synthetic construct
  REGION 1..9: note = Synthetic peptide
QQSSRTPWT

SEQ ID NO: 1867 - protein, 5 aa, synthetic construct
  REGION 1..5: note = Synthetic peptide
HYLMT

SEQ ID NO: 1868 - protein, 17 aa, synthetic construct
  REGION 1..17: note = Synthetic peptide
YISPSGGHTIYADSVKG

SEQ ID NO: 1869 - protein, 16 aa, synthetic construct
  REGION 1..16: note = Synthetic peptide
VAQGIVARSRTSYLHQ

SEQ ID NO: 1870 - protein, 12 aa, synthetic construct
  REGION 1..12: note = Synthetic peptide
RTSQFVNSNYLA

SEQ ID NO: 1871 - protein, 7 aa, synthetic construct
  REGION 1..7: note = Synthetic peptide
GASSRAT

SEQ ID NO: 1872 - protein, 9 aa, synthetic construct
  REGION 1..9: note = Synthetic peptide
QQSSRTPWT

SEQ ID NO: 1873 - protein, 5 aa, synthetic construct
  REGION 1..5: note = Synthetic peptide
HYLMT

SEQ ID NO: 1874 - protein, 17 aa, synthetic construct
  REGION 1..17: note = Synthetic peptide
YISPSGGHTIYADSVKG

SEQ ID NO: 1875 - protein, 16 aa, synthetic construct
  REGION 1..16: note = Synthetic peptide
VGRGIAARSRTSQLDY

SEQ ID NO: 1876 - protein, 12 aa, synthetic construct
  REGION 1..12: note = Synthetic peptide
RTSQFVNSNYLA

SEQ ID NO: 1877 - protein, 7 aa, synthetic construct
  REGION 1..7: note = Synthetic peptide
GASSRAT

SEQ ID NO: 1878 - protein, 9 aa, synthetic construct
  REGION 1..9: note = Synthetic peptide
QQSSRTPWT

SEQ ID NO: 1879 - protein, 5 aa, synthetic construct
  REGION 1..5: note = Synthetic peptide
HYLMT

SEQ ID NO: 1880 - protein, 17 aa, synthetic construct
  REGION 1..17: note = Synthetic peptide
YISPSGGHTIYADSVKG

SEQ ID NO: 1881 - protein, 16 aa, synthetic construct
  REGION 1..16: note = Synthetic peptide
VARGIAARSRTSYLDY

SEQ ID NO: 1882 - protein, 12 aa, synthetic construct
  REGION 1..12: note = Synthetic peptide
RTSQFVNSNYLA

SEQ ID NO: 1883 - protein, 7 aa, synthetic construct
  REGION 1..7: note = Synthetic peptide
GASSRAT

SEQ ID NO: 1884 - protein, 9 aa, synthetic construct
  REGION 1..9: note = Synthetic peptide
QQSSRTPWT

SEQ ID NO: 1885 - protein, 5 aa, synthetic construct
  REGION 1..5: note = Synthetic peptide
NYMMG

SEQ ID NO: 1886 - protein, 17 aa, synthetic construct
  REGION 1..17: note = Synthetic peptide
SISPSGGLTKYADSVKG

SEQ ID NO: 1887 - protein, 16 aa, synthetic construct
  REGION 1..16: note = Synthetic peptide
VARGIAARSRTSYFDY

SEQ ID NO: 1888 - protein, 12 aa, synthetic construct
  REGION 1..12: note = Synthetic peptide
RTSQFVNSNYLA

SEQ ID NO: 1889 - protein, 7 aa, synthetic construct
  REGION 1..7: note = Synthetic peptide
GASSRAT

SEQ ID NO: 1890 - protein, 9 aa, synthetic construct
  REGION 1..9: note = Synthetic peptide
QQSSRTPWT

SEQ ID NO: 1891 - protein, 5 aa, synthetic construct
  REGION 1..5: note = Synthetic peptide
HYLMT

SEQ ID NO: 1892 - protein, 17 aa, synthetic construct
  REGION 1..17: note = Synthetic peptide
YISPSGGHTIYADSVKG

SEQ ID NO: 1893 - protein, 16 aa, synthetic construct
  REGION 1..16: note = Synthetic peptide
VARGIAARSRTRYFDQ

SEQ ID NO: 1894 - protein, 12 aa, synthetic construct
  REGION 1..12: note = Synthetic peptide
RTSQFVNSNYLA

SEQ ID NO: 1895 - protein, 7 aa, synthetic construct
  REGION 1..7: note = Synthetic peptide
GASSRAT

SEQ ID NO: 1896 - protein, 9 aa, synthetic construct
  REGION 1..9: note = Synthetic peptide
QQSSRTPWT

SEQ ID NO: 1897 - protein, 5 aa, synthetic construct
  REGION 1..5: note = Synthetic peptide
GYMMV

SEQ ID NO: 1898 - protein, 17 aa, synthetic construct
  REGION 1..17: note = Synthetic peptide
RISPSGGPTIYADSVKG

SEQ ID NO: 1899 - protein, 16 aa, synthetic construct
  REGION 1..16: note = Synthetic peptide
VARGIAARSRTSYFDY

SEQ ID NO: 1900 - protein, 12 aa, synthetic construct
  REGION 1..12: note = Synthetic peptide
RTSQFVNSNYLA

SEQ ID NO: 1901 - protein, 7 aa, synthetic construct
  REGION 1..7: note = Synthetic peptide
GASSRAT

SEQ ID NO: 1902 - protein, 9 aa, synthetic construct
  REGION 1..9: note = Synthetic peptide
QQSSRTPWT

SEQ ID NO: 1903 - protein, 5 aa, synthetic construct
  REGION 1..5: note = Synthetic peptide
HYLMT

SEQ ID NO: 1904 - protein, 17 aa, synthetic construct
  REGION 1..17: note = Synthetic peptide
YISPSGGHTIYADSVKG

SEQ ID NO: 1905 - protein, 16 aa, synthetic construct
  REGION 1..16: note = Synthetic peptide
VARGIAARSRTSYFDQ

SEQ ID NO: 1906 - protein, 12 aa, synthetic construct
  REGION 1..12: note = Synthetic peptide
RTSQFVNSNYLA

SEQ ID NO: 1907 - protein, 7 aa, synthetic construct
  REGION 1..7: note = Synthetic peptide
GASSRAT

SEQ ID NO: 1908 - protein, 9 aa, synthetic construct
  REGION 1..9: note = Synthetic peptide
QQSSRTPWT

SEQ ID NO: 1909 - protein, 5 aa, synthetic construct
  REGION 1..5: note = Synthetic peptide
HYLMT

SEQ ID NO: 1910 - protein, 17 aa, synthetic construct
  REGION 1..17: note = Synthetic peptide
YISPSGGHTIYADSVKG

SEQ ID NO: 1911 - protein, 16 aa, synthetic construct
  REGION 1..16: note = Synthetic peptide
VARGIAARSRTILLDQ

SEQ ID NO: 1912 - protein, 12 aa, synthetic construct
  REGION 1..12: note = Synthetic peptide
RTSQFVNSNYLA

SEQ ID NO: 1913 - protein, 7 aa, synthetic construct
  REGION 1..7: note = Synthetic peptide
GASSRAT

SEQ ID NO: 1914 - protein, 9 aa, synthetic construct
  REGION 1..9: note = Synthetic peptide
QQSSRTPWT

SEQ ID NO: 1915 - protein, 5 aa, synthetic construct
  REGION 1..5: note = Synthetic peptide
HYLMT

SEQ ID NO: 1916 - protein, 17 aa, synthetic construct
  REGION 1..17: note = Synthetic peptide
YISPSGGHTIYADSVKG

SEQ ID NO: 1917 - protein, 16 aa, synthetic construct
  REGION 1..16: note = Synthetic peptide
VARGIAARSRTSFIDY

SEQ ID NO: 1918 - protein, 12 aa, synthetic construct
  REGION 1..12: note = Synthetic peptide
RTSQFVNSNYLA

SEQ ID NO: 1919 - protein, 7 aa, synthetic construct
  REGION 1..7: note = Synthetic peptide
GASSRAT

SEQ ID NO: 1920 - protein, 9 aa, synthetic construct
  REGION 1..9: note = Synthetic peptide
QQSSRTPWT

SEQ ID NO: 1921 - protein, 5 aa, synthetic construct
  REGION 1..5: note = Synthetic peptide
TYKMQ

SEQ ID NO: 1922 - protein, 17 aa, synthetic construct
  REGION 1..17: note = Synthetic peptide
SISPSGGPTNYADSVKG

SEQ ID NO: 1923 - protein, 16 aa, synthetic construct
  REGION 1..16: note = Synthetic peptide
VARGIAARSRTSYFDY

SEQ ID NO: 1924 - protein, 12 aa, synthetic construct
  REGION 1..12: note = Synthetic peptide
RTSQFVNSNYLA

SEQ ID NO: 1925 - protein, 7 aa, synthetic construct
  REGION 1..7: note = Synthetic peptide
GASSRAT

SEQ ID NO: 1926 - protein, 9 aa, synthetic construct
  REGION 1..9: note = Synthetic peptide
QQSSRTPWT

SEQ ID NO: 1927 - protein, 5 aa, synthetic construct
  REGION 1..5: note = Synthetic peptide
HYLMT

SEQ ID NO: 1928 - protein, 17 aa, synthetic construct
  REGION 1..17: note = Synthetic peptide
YISPSGGHTIYADSVKG

SEQ ID NO: 1929 - protein, 16 aa, synthetic construct
  REGION 1..16: note = Synthetic peptide
VARGIAARSRTSYLDF

SEQ ID NO: 1930 - protein, 12 aa, synthetic construct
  REGION 1..12: note = Synthetic peptide
RTSQFVNSNYLA

SEQ ID NO: 1931 - protein, 7 aa, synthetic construct
  REGION 1..7: note = Synthetic peptide
GASSRAT

SEQ ID NO: 1932 - protein, 9 aa, synthetic construct
  REGION 1..9: note = Synthetic peptide
QQSSRTPWT

SEQ ID NO: 1933 - protein, 5 aa, synthetic construct
  REGION 1..5: note = Synthetic peptide
HYLMT

SEQ ID NO: 1934 - protein, 17 aa, synthetic construct
  REGION 1..17: note = Synthetic peptide
YISPSGGHTIYADSVKG

SEQ ID NO: 1935 - protein, 16 aa, synthetic construct
  REGION 1..16: note = Synthetic peptide
VARGIAARSRTRSFDY

SEQ ID NO: 1936 - protein, 12 aa, synthetic construct
  REGION 1..12: note = Synthetic peptide
RTSQFVNSNYLA

SEQ ID NO: 1937 - protein, 7 aa, synthetic construct
  REGION 1..7: note = Synthetic peptide
GASSRAT

SEQ ID NO: 1938 - protein, 9 aa, synthetic construct
  REGION 1..9: note = Synthetic peptide
QQSSRTPWT

SEQ ID NO: 1939 - protein, 5 aa, synthetic construct
  REGION 1..5: note = Synthetic peptide
HYLMT

SEQ ID NO: 1940 - protein, 17 aa, synthetic construct
  REGION 1..17: note = Synthetic peptide
YISPSGGHTIYADSVKG

SEQ ID NO: 1941 - protein, 16 aa, synthetic construct
  REGION 1..16: note = Synthetic peptide
VARGIAARSRTSYFNQ

SEQ ID NO: 1942 - protein, 12 aa, synthetic construct
  REGION 1..12: note = Synthetic peptide
RTSQFVNSNYLA

SEQ ID NO: 1943 - protein, 7 aa, synthetic construct
  REGION 1..7: note = Synthetic peptide
GASSRAT

SEQ ID NO: 1944 - protein, 9 aa, synthetic construct
  REGION 1..9: note = Synthetic peptide
QQSSRTPWT

SEQ ID NO: 1945 - protein, 5 aa, synthetic construct
  REGION 1..5: note = Synthetic peptide
HYLMT

SEQ ID NO: 1946 - protein, 17 aa, synthetic construct
  REGION 1..17: note = Synthetic peptide
YISPSGGHTIYADSVKG

SEQ ID NO: 1947 - protein, 16 aa, synthetic construct
  REGION 1..16: note = Synthetic peptide
VARGIAARSRTSFFDQ

SEQ ID NO: 1948 - protein, 12 aa, synthetic construct
  REGION 1..12: note = Synthetic peptide
RTSQFVNSNYLA

SEQ ID NO: 1949 - protein, 7 aa, synthetic construct
  REGION 1..7: note = Synthetic peptide
GASSRAT

SEQ ID NO: 1950 - protein, 9 aa, synthetic construct
  REGION 1..9: note = Synthetic peptide
QQSSRTPWT

SEQ ID NO: 1951 - protein, 5 aa, synthetic construct
  REGION 1..5: note = Synthetic peptide
HYLMT

SEQ ID NO: 1952 - protein, 17 aa, synthetic construct
  REGION 1..17: note = Synthetic peptide
YISPSGGHTIYADSVKG

SEQ ID NO: 1953 - protein, 16 aa, synthetic construct
  REGION 1..16: note = Synthetic peptide
VARGIAARSRTSYFDT

SEQ ID NO: 1954 - protein, 12 aa, synthetic construct
  REGION 1..12: note = Synthetic peptide
RTSQFVNSNYLA

SEQ ID NO: 1955 - protein, 7 aa, synthetic construct
  REGION 1..7: note = Synthetic peptide
GASSRAT

SEQ ID NO: 1956 - protein, 9 aa, synthetic construct
  REGION 1..9: note = Synthetic peptide
QQSSRTPWT

SEQ ID NO: 1957 - protein, 5 aa, synthetic construct
  REGION 1..5: note = Synthetic peptide
DYMMT

SEQ ID NO: 1958 - protein, 17 aa, synthetic construct
  REGION 1..17: note = Synthetic peptide
YISPSGGLTSYADSVKG

SEQ ID NO: 1959 - protein, 16 aa, synthetic construct
  REGION 1..16: note = Synthetic peptide
VARGIAARSRTSYFDY

SEQ ID NO: 1960 - protein, 12 aa, synthetic construct
  REGION 1..12: note = Synthetic peptide
RTSQFVNSNYLA

SEQ ID NO: 1961 - protein, 7 aa, synthetic construct
  REGION 1..7: note = Synthetic peptide
GASSRAT

SEQ ID NO: 1962 - protein, 9 aa, synthetic construct
  REGION 1..9: note = Synthetic peptide
QQSSRTPWT

SEQ ID NO: 1963 - protein, 5 aa, synthetic construct
  REGION 1..5: note = Synthetic peptide
EYMMV

SEQ ID NO: 1964 - protein, 17 aa, synthetic construct
  REGION 1..17: note = Synthetic peptide
RISPSGGTTEYADSVKG

SEQ ID NO: 1965 - protein, 16 aa, synthetic construct
  REGION 1..16: note = Synthetic peptide
VARGIAARSRTSYFDY

SEQ ID NO: 1966 - protein, 12 aa, synthetic construct
  REGION 1..12: note = Synthetic peptide
RTSQFVNSNYLA

SEQ ID NO: 1967 - protein, 7 aa, synthetic construct
  REGION 1..7: note = Synthetic peptide
GASSRAT

SEQ ID NO: 1968 - protein, 9 aa, synthetic construct
  REGION 1..9: note = Synthetic peptide
QQSSRTPWT

SEQ ID NO: 1969 - protein, 5 aa, synthetic construct
  REGION 1..5: note = Synthetic peptide
HYLMT

SEQ ID NO: 1970 - protein, 17 aa, synthetic construct
  REGION 1..17: note = Synthetic peptide
YISPSGGHTIYADSVKG

SEQ ID NO: 1971 - protein, 16 aa, synthetic construct
  REGION 1..16: note = Synthetic peptide
VARGIAARSRTRYIDQ

SEQ ID NO: 1972 - protein, 12 aa, synthetic construct
  REGION 1..12: note = Synthetic peptide
RTSQFVNSNYLA

SEQ ID NO: 1973 - protein, 7 aa, synthetic construct
  REGION 1..7: note = Synthetic peptide
GASSRAT

SEQ ID NO: 1974 - protein, 9 aa, synthetic construct
  REGION 1..9: note = Synthetic peptide
QQSSRTPWT

SEQ ID NO: 1975 - protein, 5 aa, synthetic construct
  REGION 1..5: note = Synthetic peptide
VYMMS

SEQ ID NO: 1976 - protein, 17 aa, synthetic construct
  REGION 1..17: note = Synthetic peptide
SIVPSGGSTTYADSVKG

SEQ ID NO: 1977 - protein, 16 aa, synthetic construct
  REGION 1..16: note = Synthetic peptide
VARGIAARSRTSYFDY

SEQ ID NO: 1978 - protein, 12 aa, synthetic construct
  REGION 1..12: note = Synthetic peptide
RTSQFVNSNYLA

SEQ ID NO: 1979 - protein, 7 aa, synthetic construct
  REGION 1..7: note = Synthetic peptide
GASSRAT

SEQ ID NO: 1980 - protein, 9 aa, synthetic construct
  REGION 1..9: note = Synthetic peptide
QQSSRTPWT

SEQ ID NO: 1981 - protein, 5 aa, synthetic construct
  REGION 1..5: note = Synthetic peptide
HYLMT

SEQ ID NO: 1982 - protein, 17 aa, synthetic construct
  REGION 1..17: note = Synthetic peptide
YISPSGGHTIYADSVKG

SEQ ID NO: 1983 - protein, 16 aa, synthetic construct
  REGION 1..16: note = Synthetic peptide
VARGIAYRRRTSYFDY

SEQ ID NO: 1984 - protein, 12 aa, synthetic construct
  REGION 1..12: note = Synthetic peptide
RTSQFVNSNYLA

SEQ ID NO: 1985 - protein, 7 aa, synthetic construct
  REGION 1..7: note = Synthetic peptide
GASSRAT

SEQ ID NO: 1986 - protein, 9 aa, synthetic construct
  REGION 1..9: note = Synthetic peptide
QQSSRTPWT

SEQ ID NO: 1987 - protein, 5 aa, synthetic construct
  REGION 1..5: note = Synthetic peptide
HYLMT

SEQ ID NO: 1988 - protein, 17 aa, synthetic construct
  REGION 1..17: note = Synthetic peptide
YISPSGGHTIYADSVKG

SEQ ID NO: 1989 - protein, 16 aa, synthetic construct
  REGION 1..16: note = Synthetic peptide
VARGIADRSRTSYSDY

SEQ ID NO: 1990 - protein, 12 aa, synthetic construct
  REGION 1..12: note = Synthetic peptide
RTSQFVNSNYLA

SEQ ID NO: 1991 - protein, 7 aa, synthetic construct
  REGION 1..7: note = Synthetic peptide
GASSRAT

SEQ ID NO: 1992 - protein, 9 aa, synthetic construct
  REGION 1..9: note = Synthetic peptide
QQSSRTPWT

SEQ ID NO: 1993 - protein, 5 aa, synthetic construct
  REGION 1..5: note = Synthetic peptide
QYMMM

SEQ ID NO: 1994 - protein, 17 aa, synthetic construct
  REGION 1..17: note = Synthetic peptide
RISPSGGSTLYADSVKG

SEQ ID NO: 1995 - protein, 16 aa, synthetic construct
  REGION 1..16: note = Synthetic peptide
VARGIAARSRTSYFDY

SEQ ID NO: 1996 - protein, 12 aa, synthetic construct
  REGION 1..12: note = Synthetic peptide
RTSQFVNSNYLA

SEQ ID NO: 1997 - protein, 7 aa, synthetic construct
  REGION 1..7: note = Synthetic peptide
GASSRAT

SEQ ID NO: 1998 - protein, 9 aa, synthetic construct
  REGION 1..9: note = Synthetic peptide
QQSSRTPWT

SEQ ID NO: 1999 - protein, 5 aa, synthetic construct
  REGION 1..5: note = Synthetic peptide
DYMMM

SEQ ID NO: 2000 - protein, 17 aa, synthetic construct
  REGION 1..17: note = Synthetic peptide
SIVPSGGHTQYADSVKG

SEQ ID NO: 2001 - protein, 16 aa, synthetic construct
  REGION 1..16: note = Synthetic peptide
VARGIAARSRTSYFDY

SEQ ID NO: 2002 - protein, 12 aa, synthetic construct
  REGION 1..12: note = Synthetic peptide
RTSQFVNSNYLA

SEQ ID NO: 2003 - protein, 7 aa, synthetic construct
  REGION 1..7: note = Synthetic peptide
GASSRAT

SEQ ID NO: 2004 - protein, 9 aa, synthetic construct
  REGION 1..9: note = Synthetic peptide
QQSSRTPWT

SEQ ID NO: 2005 - protein, 5 aa, synthetic construct
  REGION 1..5: note = Synthetic peptide
HYLMT

SEQ ID NO: 2006 - protein, 17 aa, synthetic construct
  REGION 1..17: note = Synthetic peptide
YISPSGGHTIYADSVKG

SEQ ID NO: 2007 - protein, 16 aa, synthetic construct
  REGION 1..16: note = Synthetic peptide
VARGIAARSRNSQQDY

SEQ ID NO: 2008 - protein, 12 aa, synthetic construct
  REGION 1..12: note = Synthetic peptide
RTSQFVNSNYLA

SEQ ID NO: 2009 - protein, 7 aa, synthetic construct
  REGION 1..7: note = Synthetic peptide
GASSRAT

SEQ ID NO: 2010 - protein, 9 aa, synthetic construct
  REGION 1..9: note = Synthetic peptide
QQSSRTPWT

SEQ ID NO: 2011 - protein, 5 aa, synthetic construct
  REGION 1..5: note = Synthetic peptide
HYLMT

SEQ ID NO: 2012 - protein, 17 aa, synthetic construct
  REGION 1..17: note = Synthetic peptide
YISPSGGHTIYADSVKG

SEQ ID NO: 2013 - protein, 16 aa, synthetic construct
  REGION 1..16: note = Synthetic peptide
VARGIAARSRTSYFDQ

SEQ ID NO: 2014 - protein, 12 aa, synthetic construct
  REGION 1..12: note = Synthetic peptide
RTSQFVNSNYLA

SEQ ID NO: 2015 - protein, 7 aa, synthetic construct
  REGION 1..7: note = Synthetic peptide
GASSRAT

SEQ ID NO: 2016 - protein, 9 aa, synthetic construct
  REGION 1..9: note = Synthetic peptide
QQSSRTPWT

SEQ ID NO: 2017 - protein, 5 aa, synthetic construct
  REGION 1..5: note = Synthetic peptide
HYLMT

SEQ ID NO: 2018 - protein, 17 aa, synthetic construct
  REGION 1..17: note = Synthetic peptide
YISPSGGHTIYADSVKG

SEQ ID NO: 2019 - protein, 16 aa, synthetic construct
  REGION 1..16: note = Synthetic peptide
VARGIAARSRTVYFDH

SEQ ID NO: 2020 - protein, 12 aa, synthetic construct
  REGION 1..12: note = Synthetic peptide
RTSQFVNSNYLA

SEQ ID NO: 2021 - protein, 7 aa, synthetic construct
  REGION 1..7: note = Synthetic peptide
GASSRAT

SEQ ID NO: 2022 - protein, 9 aa, synthetic construct
  REGION 1..9: note = Synthetic peptide
QQSSRTPWT

SEQ ID NO: 2023 - protein, 5 aa, synthetic construct
  REGION 1..5: note = Synthetic peptide
TYMMQ

SEQ ID NO: 2024 - protein, 17 aa, synthetic construct
  REGION 1..17: note = Synthetic peptide
YIGPSGGKTDYADSVKG

SEQ ID NO: 2025 - protein, 16 aa, synthetic construct
  REGION 1..16: note = Synthetic peptide
VARGIAARSRTSYFDY

SEQ ID NO: 2026 - protein, 12 aa, synthetic construct
  REGION 1..12: note = Synthetic peptide
RTSQFVNSNYLA

SEQ ID NO: 2027 - protein, 7 aa, synthetic construct
  REGION 1..7: note = Synthetic peptide
GASSRAT

SEQ ID NO: 2028 - protein, 9 aa, synthetic construct
  REGION 1..9: note = Synthetic peptide
QQSSRTPWT

SEQ ID NO: 2029 - protein, 5 aa, synthetic construct
  REGION 1..5: note = Synthetic peptide
HYLMT

SEQ ID NO: 2030 - protein, 17 aa, synthetic construct
  REGION 1..17: note = Synthetic peptide
YISPSGGHTIYADSVKG

SEQ ID NO: 2031 - protein, 16 aa, synthetic construct
  REGION 1..16: note = Synthetic peptide
VAQGIAARSRTTQFDY

SEQ ID NO: 2032 - protein, 12 aa, synthetic construct
  REGION 1..12: note = Synthetic peptide
RTSQFVNSNYLA

SEQ ID NO: 2033 - protein, 7 aa, synthetic construct
  REGION 1..7: note = Synthetic peptide
GASSRAT

SEQ ID NO: 2034 - protein, 9 aa, synthetic construct
  REGION 1..9: note = Synthetic peptide
QQSSRTPWT

SEQ ID NO: 2035 - protein, 5 aa, synthetic construct
  REGION 1..5: note = Synthetic peptide
GYKMQ

SEQ ID NO: 2036 - protein, 17 aa, synthetic construct
  REGION 1..17: note = Synthetic peptide
SISPSGGITMYADSVKG

SEQ ID NO: 2037 - protein, 16 aa, synthetic construct
  REGION 1..16: note = Synthetic peptide
VARGIAARSRTSYFDY

SEQ ID NO: 2038 - protein, 12 aa, synthetic construct
  REGION 1..12: note = Synthetic peptide
RTSQFVNSNYLA

SEQ ID NO: 2039 - protein, 7 aa, synthetic construct
  REGION 1..7: note = Synthetic peptide
GASSRAT

SEQ ID NO: 2040 - protein, 9 aa, synthetic construct
  REGION 1..9: note = Synthetic peptide
QQSSRTPWT

SEQ ID NO: 2041 - protein, 5 aa, synthetic construct
  REGION 1..5: note = Synthetic peptide
HYLMT

SEQ ID NO: 2042 - protein, 17 aa, synthetic construct
  REGION 1..17: note = Synthetic peptide
YISPSGGHTIYADSVKG

SEQ ID NO: 2043 - protein, 16 aa, synthetic construct
  REGION 1..16: note = Synthetic peptide
VGRGIAARSRTSFFDQ

SEQ ID NO: 2044 - protein, 12 aa, synthetic construct
  REGION 1..12: note = Synthetic peptide
RTSQFVNSNYLA

SEQ ID NO: 2045 - protein, 7 aa, synthetic construct
  REGION 1..7: note = Synthetic peptide
GASSRAT

SEQ ID NO: 2046 - protein, 9 aa, synthetic construct
  REGION 1..9: note = Synthetic peptide
QQSSRTPWT

SEQ ID NO: 2047 - protein, 5 aa, synthetic construct
  REGION 1..5: note = Synthetic peptide
TYLMA

SEQ ID NO: 2048 - protein, 17 aa, synthetic construct
  REGION 1..17: note = Synthetic peptide
GIVSSGGRTLYADSVKG

SEQ ID NO: 2049 - protein, 16 aa, synthetic construct
  REGION 1..16: note = Synthetic peptide
VARGIAARSRTSYFDY

SEQ ID NO: 2050 - protein, 12 aa, synthetic construct
  REGION 1..12: note = Synthetic peptide
RTSQFVNSNYLA

SEQ ID NO: 2051 - protein, 7 aa, synthetic construct
  REGION 1..7: note = Synthetic peptide
GASSRAT

SEQ ID NO: 2052 - protein, 9 aa, synthetic construct
  REGION 1..9: note = Synthetic peptide
QQSSRTPWT

SEQ ID NO: 2053 - protein, 5 aa, synthetic construct
  REGION 1..5: note = Synthetic peptide
HYLMT

SEQ ID NO: 2054 - protein, 17 aa, synthetic construct
  REGION 1..17: note = Synthetic peptide
YISPSGGHTIYADSVKG

SEQ ID NO: 2055 - protein, 16 aa, synthetic construct
  REGION 1..16: note = Synthetic peptide
VARGIAARSRTSQFDH

SEQ ID NO: 2056 - protein, 12 aa, synthetic construct
  REGION 1..12: note = Synthetic peptide
RTSQFVNSNYLA

SEQ ID NO: 2057 - protein, 7 aa, synthetic construct
  REGION 1..7: note = Synthetic peptide
GASSRAT

SEQ ID NO: 2058 - protein, 9 aa, synthetic construct
  REGION 1..9: note = Synthetic peptide
QQSSRTPWT

SEQ ID NO: 2059 - protein, 5 aa, synthetic construct
  REGION 1..5: note = Synthetic peptide
NYTMG

SEQ ID NO: 2060 - protein, 17 aa, synthetic construct
  REGION 1..17: note = Synthetic peptide
SISPSGGKTDYADSVKG

SEQ ID NO: 2061 - protein, 16 aa, synthetic construct
  REGION 1..16: note = Synthetic peptide
VARGIAARSRTSYFDY

SEQ ID NO: 2062 - protein, 12 aa, synthetic construct
  REGION 1..12: note = Synthetic peptide
RTSQFVNSNYLA

SEQ ID NO: 2063 - protein, 7 aa, synthetic construct
  REGION 1..7: note = Synthetic peptide
GASSRAT

SEQ ID NO: 2064 - protein, 9 aa, synthetic construct
  REGION 1..9: note = Synthetic peptide
QQSSRTPWT

SEQ ID NO: 2065 - protein, 5 aa, synthetic construct
  REGION 1..5: note = Synthetic peptide
EYMMM

SEQ ID NO: 2066 - protein, 17 aa, synthetic construct
  REGION 1..17: note = Synthetic peptide
VISPSGGQTHYADSVKG

SEQ ID NO: 2067 - protein, 16 aa, synthetic construct
  REGION 1..16: note = Synthetic peptide
VARGIAARSRTSYFDY

SEQ ID NO: 2068 - protein, 12 aa, synthetic construct
  REGION 1..12: note = Synthetic peptide
RTSQFVNSNYLA

SEQ ID NO: 2069 - protein, 7 aa, synthetic construct
  REGION 1..7: note = Synthetic peptide
GASSRAT

SEQ ID NO: 2070 - protein, 9 aa, synthetic construct
  REGION 1..9: note = Synthetic peptide
QQSSRTPWT

SEQ ID NO: 2071 - protein, 5 aa, synthetic construct
  REGION 1..5: note = Synthetic peptide
NYTMQ

SEQ ID NO: 2072 - protein, 17 aa, synthetic construct
  REGION 1..17: note = Synthetic peptide
YISPSGGYTGYADSVKG

SEQ ID NO: 2073 - protein, 16 aa, synthetic construct
  REGION 1..16: note = Synthetic peptide
VARGIAARSRTSYFDY

SEQ ID NO: 2074 - protein, 12 aa, synthetic construct
  REGION 1..12: note = Synthetic peptide
RTSQFVNSNYLA

SEQ ID NO: 2075 - protein, 7 aa, synthetic construct
  REGION 1..7: note = Synthetic peptide
GASSRAT

SEQ ID NO: 2076 - protein, 9 aa, synthetic construct
  REGION 1..9: note = Synthetic peptide
QQSSRTPWT

SEQ ID NO: 2077 - protein, 5 aa, synthetic construct
  REGION 1..5: note = Synthetic peptide
HYLMT

SEQ ID NO: 2078 - protein, 17 aa, synthetic construct
  REGION 1..17: note = Synthetic peptide
YISPSGGHTIYADSVKG

SEQ ID NO: 2079 - protein, 16 aa, synthetic construct
  REGION 1..16: note = Synthetic peptide
VARGIAARSRTINLDY

SEQ ID NO: 2080 - protein, 12 aa, synthetic construct
  REGION 1..12: note = Synthetic peptide
RTSQFVNSNYLA

SEQ ID NO: 2081 - protein, 7 aa, synthetic construct
  REGION 1..7: note = Synthetic peptide
GASSRAT

SEQ ID NO: 2082 - protein, 9 aa, synthetic construct
  REGION 1..9: note = Synthetic peptide
QQSSRTPWT

SEQ ID NO: 2083 - protein, 5 aa, synthetic construct
  REGION 1..5: note = Synthetic peptide
HYLMT

SEQ ID NO: 2084 - protein, 17 aa, synthetic construct
  REGION 1..17: note = Synthetic peptide
YISPSGGHTIYADSVKG

SEQ ID NO: 2085 - protein, 16 aa, synthetic construct
  REGION 1..16: note = Synthetic peptide
VARGIAARQRTSYYDY

SEQ ID NO: 2086 - protein, 12 aa, synthetic construct
  REGION 1..12: note = Synthetic peptide
RTSQFVNSNYLA

SEQ ID NO: 2087 - protein, 7 aa, synthetic construct
  REGION 1..7: note = Synthetic peptide
GASSRAT

SEQ ID NO: 2088 - protein, 9 aa, synthetic construct
  REGION 1..9: note = Synthetic peptide
QQSSRTPWT

SEQ ID NO: 2089 - protein, 5 aa, synthetic construct
  REGION 1..5: note = Synthetic peptide
HYLMT

SEQ ID NO: 2090 - protein, 17 aa, synthetic construct
  REGION 1..17: note = Synthetic peptide
YISPSGGHTIYADSVKG

SEQ ID NO: 2091 - protein, 16 aa, synthetic construct
  REGION 1..16: note = Synthetic peptide
VAQGISGRSRLSYVDY

SEQ ID NO: 2092 - protein, 12 aa, synthetic construct
  REGION 1..12: note = Synthetic peptide
RTSQFVNSNYLA

SEQ ID NO: 2093 - protein, 7 aa, synthetic construct
  REGION 1..7: note = Synthetic peptide
GASSRAT

SEQ ID NO: 2094 - protein, 9 aa, synthetic construct
  REGION 1..9: note = Synthetic peptide
QQSSRTPWT

SEQ ID NO: 2095 - protein, 5 aa, synthetic construct
  REGION 1..5: note = Synthetic peptide
HYLMT

SEQ ID NO: 2096 - protein, 17 aa, synthetic construct
  REGION 1..17: note = Synthetic peptide
YISPSGGHTIYADSVKG

SEQ ID NO: 2097 - protein, 16 aa, synthetic construct
  REGION 1..16: note = Synthetic peptide
VARGIAARSRTSQFDY

SEQ ID NO: 2098 - protein, 12 aa, synthetic construct
  REGION 1..12: note = Synthetic peptide
RTSQFVNSNYLA

SEQ ID NO: 2099 - protein, 7 aa, synthetic construct
  REGION 1..7: note = Synthetic peptide
GASSRAT

SEQ ID NO: 2100 - protein, 9 aa, synthetic construct
  REGION 1..9: note = Synthetic peptide
QQSSRTPWT

SEQ ID NO: 2101 - protein, 5 aa, synthetic construct
  REGION 1..5: note = Synthetic peptide
HYLMT

SEQ ID NO: 2102 - protein, 17 aa, synthetic construct
  REGION 1..17: note = Synthetic peptide
YISPSGGHTIYADSVKG

SEQ ID NO: 2103 - protein, 16 aa, synthetic construct
  REGION 1..16: note = Synthetic peptide
VARGITARSRTSYFDD

SEQ ID NO: 2104 - protein, 12 aa, synthetic construct
  REGION 1..12: note = Synthetic peptide
RTSQFVNSNYLA

SEQ ID NO: 2105 - protein, 7 aa, synthetic construct
  REGION 1..7: note = Synthetic peptide
GASSRAT

SEQ ID NO: 2106 - protein, 9 aa, synthetic construct
  REGION 1..9: note = Synthetic peptide
QQSSRTPWT

SEQ ID NO: 2107 - protein, 5 aa, synthetic construct
  REGION 1..5: note = Synthetic peptide
NYDMI

SEQ ID NO: 2108 - protein, 17 aa, synthetic construct
  REGION 1..17: note = Synthetic peptide
SISSSGGTTKYADSVKG

SEQ ID NO: 2109 - protein, 16 aa, synthetic construct
  REGION 1..16: note = Synthetic peptide
VARGIAARSRTSYFDY

SEQ ID NO: 2110 - protein, 12 aa, synthetic construct
  REGION 1..12: note = Synthetic peptide
RTSQFVNSNYLA

SEQ ID NO: 2111 - protein, 7 aa, synthetic construct
  REGION 1..7: note = Synthetic peptide
GASSRAT

SEQ ID NO: 2112 - protein, 9 aa, synthetic construct
  REGION 1..9: note = Synthetic peptide
QQSSRTPWT

SEQ ID NO: 2113 - protein, 5 aa, synthetic construct
  REGION 1..5: note = Synthetic peptide
VYMMI

SEQ ID NO: 2114 - protein, 17 aa, synthetic construct
  REGION 1..17: note = Synthetic peptide
SISPSGGQTTYADSVKG

SEQ ID NO: 2115 - protein, 16 aa, synthetic construct
  REGION 1..16: note = Synthetic peptide
VARGIAARSRTSYFDY

SEQ ID NO: 2116 - protein, 12 aa, synthetic construct
  REGION 1..12: note = Synthetic peptide
RTSQFVNSNYLA

SEQ ID NO: 2117 - protein, 7 aa, synthetic construct
  REGION 1..7: note = Synthetic peptide
GASSRAT

SEQ ID NO: 2118 - protein, 9 aa, synthetic construct
  REGION 1..9: note = Synthetic peptide
QQSSRTPWT

SEQ ID NO: 2119 - protein, 5 aa, synthetic construct
  REGION 1..5: note = Synthetic peptide
HYLMT

SEQ ID NO: 2120 - protein, 17 aa, synthetic construct
  REGION 1..17: note = Synthetic peptide
YISPSGGHTIYADSVKG

SEQ ID NO: 2121 - protein, 16 aa, synthetic construct
  REGION 1..16: note = Synthetic peptide
QARGIAARSRTSYFDY

SEQ ID NO: 2122 - protein, 12 aa, synthetic construct
  REGION 1..12: note = Synthetic peptide
RTSQFVNSNYLA

SEQ ID NO: 2123 - protein, 7 aa, synthetic construct
  REGION 1..7: note = Synthetic peptide
GASSRAT

SEQ ID NO: 2124 - protein, 9 aa, synthetic construct
  REGION 1..9: note = Synthetic peptide
QQSSRTPWT

SEQ ID NO: 2125 - protein, 5 aa, synthetic construct
  REGION 1..5: note = Synthetic peptide
HYLMT

SEQ ID NO: 2126 - protein, 17 aa, synthetic construct
  REGION 1..17: note = Synthetic peptide
YISPSGGHTIYADSVKG

SEQ ID NO: 2127 - protein, 16 aa, synthetic construct
  REGION 1..16: note = Synthetic peptide
VARGISARSRTSCFDY

SEQ ID NO: 2128 - protein, 12 aa, synthetic construct
  REGION 1..12: note = Synthetic peptide
RTSQFVNSNYLA

SEQ ID NO: 2129 - protein, 7 aa, synthetic construct
  REGION 1..7: note = Synthetic peptide
GASSRAT

SEQ ID NO: 2130 - protein, 9 aa, synthetic construct
  REGION 1..9: note = Synthetic peptide
QQSSRTPWT

SEQ ID NO: 2131 - protein, 5 aa, synthetic construct
  REGION 1..5: note = Synthetic peptide
QYMMV

SEQ ID NO: 2132 - protein, 17 aa, synthetic construct
  REGION 1..17: note = Synthetic peptide
SIYSSGGNTPYADSVKG

SEQ ID NO: 2133 - protein, 16 aa, synthetic construct
  REGION 1..16: note = Synthetic peptide
VARGIAARSRTSYFDY

SEQ ID NO: 2134 - protein, 12 aa, synthetic construct
  REGION 1..12: note = Synthetic peptide
RTSQFVNSNYLA

SEQ ID NO: 2135 - protein, 7 aa, synthetic construct
  REGION 1..7: note = Synthetic peptide
GASSRAT

SEQ ID NO: 2136 - protein, 9 aa, synthetic construct
  REGION 1..9: note = Synthetic peptide
QQSSRTPWT

SEQ ID NO: 2137 - protein, 5 aa, synthetic construct
  REGION 1..5: note = Synthetic peptide
HYLMT

SEQ ID NO: 2138 - protein, 17 aa, synthetic construct
  REGION 1..17: note = Synthetic peptide
YISPSGGHTIYADSVKG

SEQ ID NO: 2139 - protein, 16 aa, synthetic construct
  REGION 1..16: note = Synthetic peptide
VGRGIAARSRTSYFDK

SEQ ID NO: 2140 - protein, 12 aa, synthetic construct
  REGION 1..12: note = Synthetic peptide
RTSQFVNSNYLA

SEQ ID NO: 2141 - protein, 7 aa, synthetic construct
  REGION 1..7: note = Synthetic peptide
GASSRAT

SEQ ID NO: 2142 - protein, 9 aa, synthetic construct
  REGION 1..9: note = Synthetic peptide
QQSSRTPWT

SEQ ID NO: 2143 - protein, 5 aa, synthetic construct
  REGION 1..5: note = Synthetic peptide
QYDMI

SEQ ID NO: 2144 - protein, 17 aa, synthetic construct
  REGION 1..17: note = Synthetic peptide
YISSSGGFTRYADSVKG

SEQ ID NO: 2145 - protein, 16 aa, synthetic construct
  REGION 1..16: note = Synthetic peptide
VARGIAARSRTSYFDY

SEQ ID NO: 2146 - protein, 12 aa, synthetic construct
  REGION 1..12: note = Synthetic peptide
RTSQFVNSNYLA

SEQ ID NO: 2147 - protein, 7 aa, synthetic construct
  REGION 1..7: note = Synthetic peptide
GASSRAT

SEQ ID NO: 2148 - protein, 9 aa, synthetic construct
  REGION 1..9: note = Synthetic peptide
QQSSRTPWT

SEQ ID NO: 2149 - protein, 5 aa, synthetic construct
  REGION 1..5: note = Synthetic peptide
SQQMV

SEQ ID NO: 2150 - protein, 17 aa, synthetic construct
  REGION 1..17: note = Synthetic peptide
YISPSGGNTYYADSVKG

SEQ ID NO: 2151 - protein, 16 aa, synthetic construct
  REGION 1..16: note = Synthetic peptide
VARGIAARSRTSYFDY

SEQ ID NO: 2152 - protein, 12 aa, synthetic construct
  REGION 1..12: note = Synthetic peptide
RTSQFVNSNYLA

SEQ ID NO: 2153 - protein, 7 aa, synthetic construct
  REGION 1..7: note = Synthetic peptide
GASSRAT

SEQ ID NO: 2154 - protein, 9 aa, synthetic construct
  REGION 1..9: note = Synthetic peptide
QQSSRTPWT

SEQ ID NO: 2155 - protein, 5 aa, synthetic construct
  REGION 1..5: note = Synthetic peptide
NYLMA

SEQ ID NO: 2156 - protein, 17 aa, synthetic construct
  REGION 1..17: note = Synthetic peptide
WIVPSGGYTEYADSVKG

SEQ ID NO: 2157 - protein, 16 aa, synthetic construct
  REGION 1..16: note = Synthetic peptide
VARGIAARSRTSYFDY

SEQ ID NO: 2158 - protein, 12 aa, synthetic construct
  REGION 1..12: note = Synthetic peptide
RTSQFVNSNYLA

SEQ ID NO: 2159 - protein, 7 aa, synthetic construct
  REGION 1..7: note = Synthetic peptide
GASSRAT

SEQ ID NO: 2160 - protein, 9 aa, synthetic construct
  REGION 1..9: note = Synthetic peptide
QQSSRTPWT

SEQ ID NO: 2161 - protein, 5 aa, synthetic construct
  REGION 1..5: note = Synthetic peptide
HYLMT

SEQ ID NO: 2162 - protein, 17 aa, synthetic construct
  REGION 1..17: note = Synthetic peptide
YISPSGGHTIYADSVKG

SEQ ID NO: 2163 - protein, 16 aa, synthetic construct
  REGION 1..16: note = Synthetic peptide
VARGIVARSRTSNFDQ

SEQ ID NO: 2164 - protein, 12 aa, synthetic construct
  REGION 1..12: note = Synthetic peptide
RTSQFVNSNYLA

SEQ ID NO: 2165 - protein, 7 aa, synthetic construct
  REGION 1..7: note = Synthetic peptide
GASSRAT

SEQ ID NO: 2166 - protein, 9 aa, synthetic construct
  REGION 1..9: note = Synthetic peptide
QQSSRTPWT

SEQ ID NO: 2167 - protein, 5 aa, synthetic construct
  REGION 1..5: note = Synthetic peptide
HYLMT

SEQ ID NO: 2168 - protein, 17 aa, synthetic construct
  REGION 1..17: note = Synthetic peptide
YISPSGGHTIYADSVKG

SEQ ID NO: 2169 - protein, 16 aa, synthetic construct
  REGION 1..16: note = Synthetic peptide
LARGIAARSRTSYQDI

SEQ ID NO: 2170 - protein, 12 aa, synthetic construct
  REGION 1..12: note = Synthetic peptide
RTSQFVNSNYLA

SEQ ID NO: 2171 - protein, 7 aa, synthetic construct
  REGION 1..7: note = Synthetic peptide
GASSRAT

SEQ ID NO: 2172 - protein, 9 aa, synthetic construct
  REGION 1..9: note = Synthetic peptide
QQSSRTPWT

SEQ ID NO: 2173 - protein, 5 aa, synthetic construct
  REGION 1..5: note = Synthetic peptide
SYMMV

SEQ ID NO: 2174 - protein, 17 aa, synthetic construct
  REGION 1..17: note = Synthetic peptide
SISPSGGYTIQADSVKG

SEQ ID NO: 2175 - protein, 16 aa, synthetic construct
  REGION 1..16: note = Synthetic peptide
VARGIAARSRTSYFDY

SEQ ID NO: 2176 - protein, 109 aa, synthetic construct; identical to SEQ ID NO: 1142
  REGION 1..109: note = Synthetic polypeptide

SEQ ID NO: 2177 - protein, 142 aa, synthetic construct
  REGION 1..142: note = Synthetic polypeptide
EVQLLESGGGLVQPGGSLRLSCAASGFTFSNYLMAWVRQAPGKGLEWVSWIVPSGGYTEYADSVKGRFTISRDNSKNTLYLQMNSLRAEDTAVYYCARVARGIAARSRTSYFDYWGQGTLVTVSSASTKGPSVFPLAPSSKS

SEQ ID NO: 2178 - protein, 109 aa, synthetic construct; identical to SEQ ID NO: 1142
  REGION 1..109: note = Synthetic polypeptide

SEQ ID NO: 2179 - protein, 142 aa, synthetic construct
  REGION 1..142: note = Synthetic polypeptide
EVQLLESGGGLVQPGGSLRLSCAASGFTFSVYMMIWVRQAPGKGLEWVSSISPSGGQTTYADSVKGRFTISRDNSKNTLYLQMNSLRAEDTAVYYCARVARGIAARSRTSYFDYWGQGTLVTVSSASTKGPSVFPLAPSSKS

SEQ ID NO: 2180 - protein, 109 aa, synthetic construct; identical to SEQ ID NO: 1142
  REGION 1..109: note = Synthetic polypeptide

SEQ ID NO: 2181 - protein, 142 aa, synthetic construct
  REGION 1..142: note = Synthetic polypeptide
EVQLLESGGGLVQPGGSLRLSCAASGFTFSDYMMTWVRQAPGKGLQWVSYISPSGGLTSYADSVKGRFTISRDNSKNTLYLQMNSLRAEDTAVYYCARVARGIAARSRTSYFDYWGQGTLVTVSSASTKGPSVFPLAPSSKS

SEQ ID NO: 2182 - protein, 109 aa, synthetic construct; identical to SEQ ID NO: 1142
  REGION 1..109: note = Synthetic polypeptide

SEQ ID NO: 2183 - protein, 142 aa, synthetic construct
  REGION 1..142: note = Synthetic polypeptide
EVQLLESGGGLVQPGGSLRLSCAASGFTFSTYMMQWVRQAPGKGLEWVSYIGPSGGKTDYADSVKGRFTISRDNSKNTLYLQMNSLRAEDTAVYYCARVARGIAARSRTSYFDYWGQGTLVTVSSASTKGPSVFPLAPSSKS

SEQ ID NO: 2184 - protein, 109 aa, synthetic construct; identical to SEQ ID NO: 1142
  REGION 1..109: note = Synthetic polypeptide

SEQ ID NO: 2185 - protein, 142 aa, synthetic construct
  REGION 1..142: note = Synthetic polypeptide
EVQLLESGGGLVQPGGSLRLSCAASGFTFSTYLMAWVRQAPGKGLEWVSGIVSSGGRTLYADSVKGRFTISRDNSKNTLYLQMNSLRAEDTAVYYCARVARGIAARSRTSYFDYWGQGTLVTVSSASTKGPSVFPLAPSSKS

SEQ ID NO: 2186 - protein, 109 aa, synthetic construct; identical to SEQ ID NO: 1142
  REGION 1..109: note = Synthetic polypeptide

SEQ ID NO: 2187 - protein, 142 aa, synthetic construct
  REGION 1..142: note = Synthetic polypeptide
EVQLLESGGGLVQPGGSLRLSCAASGFTFSQYDMIWVRQAPGKGLEWVSYISSSGGFTRYADSVKGRFTISRDNSKNTLYLQMNSLRAEDTAVYYCARVARGIAARSRTSYFDYWGQGTLVTVSSASTKGPSVFPLAPSSKS

SEQ ID NO: 2188 - protein, 109 aa, synthetic construct; identical to SEQ ID NO: 1142
  REGION 1..109: note = Synthetic polypeptide

SEQ ID NO: 2189 - protein, 142 aa, synthetic construct
  REGION 1..142: note = Synthetic polypeptide
EVQLLESGGGLVQPGGSLRLSCAASGFTFSNYDMIWVRQAPGKGLEWVSSISSSGGTTKYADSVKGRFTISRDNSKNTLYLQMNSLRAEDTAVYYCARVARGIAARSRTSYFDYWGQGTLVTVSSASTKGPSVFPLAPSSKS

SEQ ID NO: 2190 - protein, 109 aa, synthetic construct; identical to SEQ ID NO: 1142
  REGION 1..109: note = Synthetic polypeptide

SEQ ID NO: 2191 - protein, 142 aa, synthetic construct
  REGION 1..142: note = Synthetic polypeptide
EVQLLESGGGLVQPGGSLRLSCAASGFTFSQYMMMWVRQAPGKGLEWVSRISPSGGSTLYADSVKGRFTISRDNSKNTLYLQMNSLRAEDTAVYYCARVARGIAARSRTSYFDYWGQGTLVTVSSASTKGPSVFPLAPSSKS

SEQ ID NO: 2192 - protein, 109 aa, synthetic construct; identical to SEQ ID NO: 1142
  REGION 1..109: note = Synthetic polypeptide

SEQ ID NO: 2193 - protein, 142 aa, synthetic construct
  REGION 1..142: note = Synthetic polypeptide
EVQLLESGGGLVQPGGSLRLSCAASGFTFSTYKMQWVRQAPGKGLEWVSSISPSGGPTNYADSVKGRFTISRDNSKNTLYLQMNSLRAEDTAVYYCARVARGIAARSRTSYFDYWGQGTLVTVSSASTKGPSVFPLAPSSKS

SEQ ID NO: 2194 - protein, 109 aa, synthetic construct; identical to SEQ ID NO: 1142
  REGION 1..109: note = Synthetic polypeptide

SEQ ID NO: 2195 - protein, 142 aa, synthetic construct
  REGION 1..142: note = Synthetic polypeptide
EVQLLESGGGLVQPGGSLRLSCAASGFTFSNYTMGWVRQAPGKGLEWVSSISPSGGKTDYADSVKGRFTISRDNSKNTLYLQMNSLRAEDTAVYYCARVARGIAARSRTSYFDYWGQGTLVTVSSASTKGPSVFPLAPSSKS

SEQ ID NO: 2196 - protein, 109 aa, synthetic construct; identical to SEQ ID NO: 1142
  REGION 1..109: note = Synthetic polypeptide

SEQ ID NO: 2197 - protein, 142 aa, synthetic construct
  REGION 1..142: note = Synthetic polypeptide
EVQLLESGGGLVQPGGSLRLSCAASGFTFSSQQMVWVRQAPGKGLEWVSYISPSGGNTYYADSVKGRFTISRDNSKNTLYLQMNSLRAEDTAVYYCARVARGIAARSRTSYFDYWGQGTLVTVSSASTKGPSVFPLAPSSKS

SEQ ID NO: 2198 - protein, 109 aa, synthetic construct; identical to SEQ ID NO: 1142
  REGION 1..109: note = Synthetic polypeptide

SEQ ID NO: 2199 - protein, 142 aa, synthetic construct
  REGION 1..142: note = Synthetic polypeptide
EVQLLESGGGLVQPGGSLRLSCAASGFTFSNYTMQWVRQAPGKGLQWVSYISPSGGYTGYADSVKGRFTISRDNSKNTLYLQMNSLRAEDTAVYYCARVARGIAARSRTSYFDYWGQGTLVTVSSASTKGPSVFPLAPSSKS

SEQ ID NO: 2200 - protein, 109 aa, synthetic construct; identical to SEQ ID NO: 1142
  REGION 1..109: note = Synthetic polypeptide

SEQ ID NO: 2201 - protein, 142 aa, synthetic construct
  REGION 1..142: note = Synthetic polypeptide
EVQLLESGGGLVQPGGSLRLSCAASGFTFSDYMMMWVRQAPGKGLEWVSSIVPSGGHTQYADSVKGRFTISRDNSKNTLYLQMNSLRAEDTAVYYCARVARGIAARSRTSYFDYWGQGTLVTVSSASTKGPSVFPLAPSSKS

SEQ ID NO: 2202 - protein, 109 aa, synthetic construct; identical to SEQ ID NO: 1142
  REGION 1..109: note = Synthetic polypeptide

SEQ ID NO: 2203 - protein, 142 aa, synthetic construct
  REGION 1..142: note = Synthetic polypeptide
EVQLLESGGGLVQPGGSLRLSCAASGFTFSNYMMGWVRQAPGKGLQWVSSISPSGGLTKYADSVKGRFTISRDNSKNTLYLQMNSLRAEDTAVYYCARVARGIAARSRTSYFDYWGQGTLVTVSSASTKGPSVFPLAPSSKS

SEQ ID NO: 2204 - protein, 109 aa, synthetic construct; identical to SEQ ID NO: 1142
  REGION 1..109: note = Synthetic polypeptide

SEQ ID NO: 2205 - protein, 142 aa, synthetic construct
  REGION 1..142: note = Synthetic polypeptide
EVQLLESGGGLVQPGGSLRLSCAASGFTFSQYLMAWVRQAPGKGLEWVSSIYPSGGWTKYADSVKGRFTISRDNSKNTLYLQMNSLRAEDTAVYYCARVARGIAARSRTSYFDYWGQGTLVTVSSASTKGPSVFPLAPSSKS

SEQ ID NO: 2206 - protein, 109 aa, synthetic construct; identical to SEQ ID NO: 1142
  REGION 1..109: note = Synthetic polypeptide

SEQ ID NO: 2207 - protein, 142 aa, synthetic construct
  REGION 1..142: note = Synthetic polypeptide
EVQLLESGGGLVQPGGSLRLSCAASGFTFSQYMMVWVRQAPGKGLEWVSSIYSSGGNTPYADSVKGRFTISRDNSKNTLYLQMNSLRAEDTAVYYCARVARGIAARSRTSYFDYWGQGTLVTVSSASTKGPSVFPLAPSSKS

SEQ ID NO: 2208 - protein, 109 aa, synthetic construct; identical to SEQ ID NO: 1142
  REGION 1..109: note = Synthetic polypeptide

SEQ ID NO: 2209 - protein, 142 aa, synthetic construct
  REGION 1..142: note = Synthetic polypeptide
EVQLLESGGGLVQPGGSLRLSCAASGFTFSEYMMMWVRQAPGKGLEWVSVISPSGGQTHYADSVKGRFTISRDNSKNTLYLQMNSLRAEDTAVYYCARVARGIAARSRTSYFDYWGQGTLVTVSSASTKGPSVFPLAPSSKS

SEQ ID NO: 2210 - protein, 109 aa, synthetic construct; identical to SEQ ID NO: 1142
  REGION 1..109: note = Synthetic polypeptide

SEQ ID NO: 2211 - protein, 142 aa, synthetic construct
  REGION 1..142: note = Synthetic polypeptide
EVQLLESGGGLVQPGGSLRLSCAASGFTFSGYMMVWVRQAPGKGLEWVSRISPSGGPTIYADSVKGRFTISRDNSKNTLYLQMNSLRAEDTAVYYCARVARGIAARSRTSYFDYWGQGTLVTVSSASTKGPSVFPLAPSSKS

SEQ ID NO: 2212 - protein, 109 aa, synthetic construct; identical to SEQ ID NO: 1142
  REGION 1..109: note = Synthetic polypeptide

SEQ ID NO: 2213 - protein, 142 aa, synthetic construct
  REGION 1..142: note = Synthetic polypeptide
EVQLLESGGGLVQPGGSLRLSCAASGFTFSVYMMSWVRQAPGKGLEWVSSIVPSGGSTTYADSVKGRFTISRDNSKNTLYLQMNSLRAEDTAVYYCARVARGIAARSRTSYFDYWGQGTLVTVSSASTKGPSVFPLAPSSKS

SEQ ID NO: 2214 - protein, 109 aa, synthetic construct; identical to SEQ ID NO: 1142
  REGION 1..109: note = Synthetic polypeptide

SEQ ID NO: 2215 - protein, 142 aa, synthetic construct
  REGION 1..142: note = Synthetic polypeptide
EVQLLESGGGLVQPGGSLRLSCAASGFTFSEYMMVWVRQAPGKGLEWVSRISPSGGTTEYADSVKGRFTISRDNSKNTLYLQMNSLRAEDTAVYYCARVARGIAARSRTSYFDYWGQGTLVTVSSASTKGPSVFPLAPSSKS

SEQ ID NO: 2216 - protein, 109 aa, synthetic construct; identical to SEQ ID NO: 1142
  REGION 1..109: note = Synthetic polypeptide

SEQ ID NO: 2217 - protein, 142 aa, synthetic construct
  REGION 1..142: note = Synthetic polypeptide
EVQLLESGGGLVQPGGSLRLSCAASGFTFSSYMMVWVRQAPGKGLEWVSSISPSGGYTIQADSVKGRFTISRDNSKNTLYLQMNSLRAEDTAVYYCARVARGIAARSRTSYFDYWGQGTLVTVSSASTKGPSVFPLAPSSKS

SEQ ID NO: 2218 - protein, 109 aa, synthetic construct; identical to SEQ ID NO: 1142
  REGION 1..109: note = Synthetic polypeptide

SEQ ID NO: 2219 - protein, 142 aa, synthetic construct
  REGION 1..142: note = Synthetic polypeptide
EVQLLESGGGLVQPGGSLRLSCAASGFTFSGYKMQWVRQAPGKGLEWVSSISPSGGITMYADSVKGRFTISRDNSKNTLYLQMNSLRAEDTAVYYCARVARGIAARSRTSYFDYWGQGTLVTVSSASTKGPSVFPLAPSSKS

SEQ ID NO: 2220 - protein, 109 aa, synthetic construct; identical to SEQ ID NO: 1142
  REGION 1..109: note = Synthetic polypeptide

SEQ ID NO: 2221 - protein, 142 aa, synthetic construct
  REGION 1..142: note = Synthetic polypeptide
EVQLLESGGGLVQPGGSLRLSCAASGFTFSDYMMAWVRQAPGKGLEWVSSIVPSGGHTHYADSVKGRFTISRDNSKNTLYLQMNSLRAEDTAVYYCARVARGIAARSRTSYFDYWGQGTLVTVSSASTKGPSVFPLAPSSKS

SEQ ID NO: 2222 - protein, 109 aa, synthetic construct; identical to SEQ ID NO: 1142
  REGION 1..109: note = Synthetic polypeptide

SEQ ID NO: 2223 - protein, 142 aa, synthetic construct
  REGION 1..142: note = Synthetic polypeptide
EVQLLESGGGLVQPGGSLRLSCAASGFTFSHYLMTWVRQAPGKGLEWVSYISPSGGHTIYADSVKGRFTISRDNSKNTLYLQMNSLRAEDTAVYYCARVARGISARSRTSCFDYWGQGTLVTVSSASTKGPSVFPLAPSSKS

SEQ ID NO: 2224 - protein, 109 aa, synthetic construct; identical to SEQ ID NO: 1142
  REGION 1..109: note = Synthetic polypeptide

SEQ ID NO: 2225 - protein, 142 aa, synthetic construct
  REGION 1..142: note = Synthetic polypeptide
EVQLLESGGGLVQPGGSLRLSCAASGFTFSHYLMTWVRQAPGKGLEWVSYISPSGGHTIYADSVKGRFTISRDNSKNTLYLQMNSLRAEDTALYYCARVARGIAARSRTINLDYWGQGTLVTVSSASTKGPSVFPLAPSSKS

SEQ ID NO: 2226 - protein, 109 aa, synthetic construct; identical to SEQ ID NO: 1142
  REGION 1..109: note = Synthetic polypeptide

SEQ ID NO: 2227 - protein, 142 aa, synthetic construct
  REGION 1..142: note = Synthetic polypeptide
EVQLLESGGGLVQPGGSLRLSCAASGFTFSHYLMTWVRQAPGKGLEWVSYISPSGGHTIYADSVKGRFTISRDNSKNTLYLQMNSLRAEDTAVYYCARVARGIAARSRTRSFDYWGQGTLVTVSSASTKGPSVFPLAPSSKS

SEQ ID NO: 2228 - protein, 109 aa, synthetic construct; identical to SEQ ID NO: 1142
  REGION 1..109: note = Synthetic polypeptide

SEQ ID NO: 2229 - protein, 142 aa, synthetic construct
  REGION 1..142: note = Synthetic polypeptide
EVQLLESGGGLVQPGGSLRLSCAASGFTFSHYLMTWVRQAPGKGLEWVSYISPSGGHTIYADSVKGRFTISRDNSKNTLYLQMNSLRAEDTAVYYCARVGRGIAARSRTSYFDKWGQGTLVTVSSASTKGPSVFPLAPSSKS

SEQ ID NO: 2230 - protein, 109 aa, synthetic construct; identical to SEQ ID NO: 1142
  REGION 1..109: note = Synthetic polypeptide

SEQ ID NO: 2231 - protein, 142 aa, synthetic construct
  REGION 1..142: note = Synthetic polypeptide
EVQLLESGGGLVQPGGSLRLSCAASGFTFSHYLMTWVRQAPGKGLEWVSYISPSGGHTIYADSVKGRFTISRDNSKNTLYLQMNSLRAEDTAVYYCARVARGIAARSRTSQFDHWGQGTLVTVSSASTKGPSVFPLAPSSKS

SEQ ID NO: 2232 - protein, 109 aa, synthetic construct; identical to SEQ ID NO: 1142
  REGION 1..109: note = Synthetic polypeptide

SEQ ID NO: 2233 - protein, 142 aa, synthetic construct
  REGION 1..142: note = Synthetic polypeptide
EVQLLESGGGLVQPGGSLRLSCAASGFTFSHYLMTWVRQAPGKGLEWVSYISPSGGHTIYADSVKGRFTISRDNSKNTLYLQMNSLRAEDTAVYYCARVARGIAARSRTSFFDQWGQGTLVTVSSASTKGPSVFPLAPSSKS

SEQ ID NO: 2234 - protein, 109 aa, synthetic construct; identical to SEQ ID NO: 1142
  REGION 1..109: note = Synthetic polypeptide

SEQ ID NO: 2235 - protein, 142 aa, synthetic construct
  REGION 1..142: note = Synthetic polypeptide
EVQLLESGGGLVQPGGSLRLSCAASGFTFSHYLMTWVRQAPGKGLEWVSYISPSGGHTIYADSVKGRFTISRDNSKNTLYLQMNSLRAEDTAVYYCARVARGIAARSRTSFIDYWGQGTLVTVSSASTKGPSVFPLAPSSKS

SEQ ID NO: 2236 - protein, 109 aa, synthetic construct; identical to SEQ ID NO: 1142
  REGION 1..109: note = Synthetic polypeptide

SEQ ID NO: 2237 - protein, 142 aa, synthetic construct
  REGION 1..142: note = Synthetic polypeptide
EVQLLESGGGLVQPGGSLRLSCAASGFTFSHYLMTWVRQAPGKGLEWVSYISPSGGHTIYADSVKGRFTISRDNSKNTLYLQMNSLRAEDTAVYYCARLARGIAARSRTSYQDIWGQGTLVTVSSASTKGPSVFPLAPSSKS

SEQ ID NO: 2238 - protein, 109 aa, synthetic construct; identical to SEQ ID NO: 1142
  REGION 1..109: note = Synthetic polypeptide

SEQ ID NO: 2239 - protein, 142 aa, synthetic construct
  REGION 1..142: note = Synthetic polypeptide
EVQLLESGGGLVQPGGSLRLSCAASGFTFSHYLMTWVRQAPGKGLEWVSYISPSGGHTIYADSVKGRFTISRDNSKNTLYLQMNSLRAEDTAVYYCARVAQGISARSRTSYFDYWGQGTLVTVSSASTKGPSVFPLAPSSKS

SEQ ID NO: 2240 - protein, 109 aa, synthetic construct; identical to SEQ ID NO: 1142
  REGION 1..109: note = Synthetic polypeptide

SEQ ID NO: 2241 - protein, 142 aa, synthetic construct
  REGION 1..142: note = Synthetic polypeptide
EVQLLESGGGLVQPGGSLRLSCAASGFTFSHYLMTWVRQAPGKGLEWVSYISPSGGHTIYADSVKGRFTISRDNSKNTLYLQMNSLRAEDTAVYYCARVARGIAARSRTSFFDYWGQGTLVTVSSASTKGPSVFPLAPSSKS

SEQ ID NO: 2242 - protein, 109 aa, synthetic construct; identical to SEQ ID NO: 1142
  REGION 1..109: note = Synthetic polypeptide

SEQ ID NO: 2243 - protein, 142 aa, synthetic construct
  REGION 1..142: note = Synthetic polypeptide
EVQLLESGGGLVQPGGSLRLSCAASGFTFSHYLMTWVRQAPGKGLEWVSYISPSGGHTIYADSVKGRFTISRDNSKNTLYLQMNSLRAEDTAVYYCARVARGIAARSRTSYFDQWGQGTLVTVSSASTKGPSVFPLAPSSKS

SEQ ID NO: 2244 - protein, 109 aa, synthetic construct; identical to SEQ ID NO: 1142
  REGION 1..109: note = Synthetic polypeptide

SEQ ID NO: 2245 - protein, 142 aa, synthetic construct
  REGION 1..142: note = Synthetic polypeptide
EVQLLESGGGLVQPGGSLRLSCAASGFTFSHYLMTWVRQAPGKGLEWVSYISPSGGHTIYADSVKGRFTISRDNSKNTLYLQMNSLRAEDTAVYYCARVARGIADRSRTSYSDYWGQGTLVTVSSASTKGPSVFPLAPSSKS

SEQ ID NO: 2246 - protein, 109 aa, synthetic construct; identical to SEQ ID NO: 1142
  REGION 1..109: note = Synthetic polypeptide

SEQ ID NO: 2247 - protein, 142 aa, synthetic construct
  REGION 1..142: note = Synthetic polypeptide
EVQLLESGGGLVQPGGSLRLSCAASGFTFSHYLMTWVRQAPGKGLEWVSYISPSGGHTIYADSVKGRFTISRDNSKNTLYLQMNSLRAEDTAVYYCARVARGIAARSRTSYLDYWGQGTLVTVSSASTKGPSVFPLAPSSKS

SEQ ID NO: 2248 - protein, 109 aa, synthetic construct; identical to SEQ ID NO: 1142
  REGION 1..109: note = Synthetic polypeptide

SEQ ID NO: 2249 - protein, 142 aa, synthetic construct
  REGION 1..142: note = Synthetic polypeptide
EVQLLESGGGLVQPGGSLRLSCAASGFTFSHYLMTWVRQAPGKGLEWVSYISPSGGHTIYADSVKGRFTISRDNSKNTLYLQMNSLRAEDTAVYYCARVARGIASRSRTRYCDYWGQGTLVTVSSASTKGPSVFPLAPSSKS

SEQ ID NO: 2250 - protein, 109 aa, synthetic construct; identical to SEQ ID NO: 1142
  REGION 1..109: note = Synthetic polypeptide

SEQ ID NO: 2251 - protein, 142 aa, synthetic construct
  REGION 1..142: note = Synthetic polypeptide
EVQLLESGGGLVQPGGSLRLSCAASGFTFSHYLMTWVRQAPGKGLEWVSYISPSGGHTIYADSVKGRFTISRDNSKNTLYLQMNSLRAEDTAVYYCARVARGIVARSRTSNFDQWGQGTLVTVSSASTKGPSVFPLAPSSKS

SEQ ID NO: 2252 - protein, 109 aa, synthetic construct; identical to SEQ ID NO: 1142
  REGION 1..109: note = Synthetic polypeptide

SEQ ID NO: 2253 - protein, 142 aa, synthetic construct
  REGION 1..142: note = Synthetic polypeptide
EVQLLESGGGLVQPGGSLRLSCAASGFTFSHYLMTWVRQAPGKGLEWVSYISPSGGHTIYADSVKGRFTISRDNSKNTLYLQMNSLRAEDTAVYYCARVAQGIVARSRTSYLHQWGQGTLVTVSSASTKGPSVFPLAPSSKS

SEQ ID NO: 2254 - protein, 109 aa, synthetic construct; identical to SEQ ID NO: 1142
  REGION 1..109: note = Synthetic polypeptide

SEQ ID NO: 2255 - protein, 142 aa, synthetic construct
  REGION 1..142: note = Synthetic polypeptide
EVQLLESGGGLVQPGGSLRLSCAASGFTFSHYLMTWVRQAPGKGLEWVSYISPSGGHTIYADSVKGRFTISRDNSKNTLYLQMNSLRAEDTAVYYCARVARGIAARSRTRYIDQWGQGTLVTVSSASTKGPSVFPLAPSSKS

SEQ ID NO: 2256 - protein, 109 aa, synthetic construct; identical to SEQ ID NO: 1142
  REGION 1..109: note = Synthetic polypeptide

SEQ ID NO: 2257 - protein, 142 aa, synthetic construct
  REGION 1..142: note = Synthetic polypeptide
EVQLLESGGGLVQPGGSLRLSCAASGFTFSHYLMTWVRQAPGKGLEWVSYISPSGGHTIYADSVKGRFTISRDNSKNTLYLQMNSLRAEDTAVYYCARVARGIAYRRRTSYFDYWGQGTLVTVSSASTKGPSVFPLAPSSKS

SEQ ID NO: 2258 - protein, 109 aa, synthetic construct; identical to SEQ ID NO: 1142
  REGION 1..109: note = Synthetic polypeptide

SEQ ID NO: 2259 - protein, 142 aa, synthetic construct
  REGION 1..142: note = Synthetic polypeptide
EVQLLESGGGLVQPGGSLRLSCAASGFTFSHYLMTWVRQAPGKGLEWVSYISPSGGHTIYADSVKGRFTISRDNSKNTLYLQMNSLRAEDTAVYYCAMVGQGIRGRSRTSYFAQWGQGTLVTVSSASTKGPSVFPLAPSSKS

SEQ ID NO: 2260 - protein, 109 aa, synthetic construct; identical to SEQ ID NO: 1142
  REGION 1..109: note = Synthetic polypeptide

SEQ ID NO: 2261 - protein, 142 aa, synthetic construct
  REGION 1..142: note = Synthetic polypeptide
EVQLLESGGGLVQPGGSLRLSCAASGFTFSHYLMTWVRQAPGKGLEWVSYISPSGGHTIYADSVKGRFTISRDNSKNTLYLQMNSLRAEDTAVYYCARVGRGIAARSRTSQLDYWGQGTLVTVSSASTKGPSVFPLAPSSKS

SEQ ID NO: 2262 - protein, 109 aa, synthetic construct; identical to SEQ ID NO: 1142
  REGION 1..109: note = Synthetic polypeptide

SEQ ID NO: 2263 - protein, 142 aa, synthetic construct
  REGION 1..142: note = Synthetic polypeptide
EVQLLESGGGLVQPGGSLRLSCAASGFTFSHYLMTWVRQAPGKGLEWVSYISPSGGHTIYADSVKGRFTISRDNSKNTLYLQMNSLRAEDTAVYYCARVARGITARSRTSYFDDWGQGTLVTVSSASTKGPSVFPLAPSSKS

SEQ ID NO: 2264 - protein, 109 aa, synthetic construct; identical to SEQ ID NO: 1142
  REGION 1..109: note = Synthetic polypeptide

SEQ ID NO: 2265 - protein, 142 aa, synthetic construct
  REGION 1..142: note = Synthetic polypeptide
EVQLLESGGGLVQPGGSLRLSCAASGFTFSHYLMTWVRQAPGKGLEWVSYISPSGGHTIYADSVKGRFTISRDNSKNTLYLQMNSLRAEDTAVYYCARVGRGIAARSRTSFFDQWGQGTLVTVSSASTKGPSVFPLAPSSKS

SEQ ID NO: 2266 - protein, 109 aa, synthetic construct; identical to SEQ ID NO: 1142
  REGION 1..109: note = Synthetic polypeptide

SEQ ID NO: 2267 - protein, 142 aa, synthetic construct
  REGION 1..142: note = Synthetic polypeptide
EVQLLESGGGLVQPGGSLRLSCAASGFTFSHYLMTWVRQAPGKGLEWVSYISPSGGHTIYADSVKGRFTISRDNSKNTLYLQMNSLRAEDTAVYYCATVARGIAARSRTSYFDQWGQGTLVTVSSASTKGPSVFPLAPSSKS

SEQ ID NO: 2268 - protein, 109 aa, synthetic construct; identical to SEQ ID NO: 1142
  REGION 1..109: note = Synthetic polypeptide

SEQ ID NO: 2269 - protein, 142 aa, synthetic construct
  REGION 1..142: note = Synthetic polypeptide
EVQLLESGGGLVQPGGSLRLSCAASGFTFSHYLMTWVRQAPGKGLEWVSYISPSGGHTIYADSVKGRFTISRDNSKNTLYLQMNSLRAEDTAVYYCARVARGIAARSRTILLDQWGQGTLVTVSSASTKGPSVFPLAPSSKS

SEQ ID NO: 2270 - protein, 109 aa, synthetic construct; identical to SEQ ID NO: 1142
  REGION 1..109: note = Synthetic polypeptide

SEQ ID NO: 2271 - protein, 142 aa, synthetic construct
  REGION 1..142: note = Synthetic polypeptide
EVQLLESGGGLVQPGGSLRLSCAASGFTFSHYLMTWVRQAPGKGLEWVSYISPSGGHTIYADSVKGRFTISRDNSKNTLYLQMNSLRAEDTAVYYCARQARGIAARSRTSYFDYWGQGTLVTVSSASTKGPSVFPLAPSSKS

SEQ ID NO: 2272 - protein, 109 aa, synthetic construct; identical to SEQ ID NO: 1142
  REGION 1..109: note = Synthetic polypeptide

SEQ ID NO: 2273 - protein, 142 aa, synthetic construct
  REGION 1..142: note = Synthetic polypeptide
EVQLLESGGGLVQPGGSLRLSCAASGFTFSHYLMTWVRQAPGKGLEWVSYISPSGGHTIYADSVKGRFTISRDNSKNTLYLQMNSLRAEDTAVYYCARVARGIAARSRTSYLDQWSQGTLVTVSSASTKGPSVFPLAPSSKS

SEQ ID NO: 2274 - protein, 109 aa, synthetic construct; identical to SEQ ID NO: 1142
  REGION 1..109: note = Synthetic polypeptide

SEQ ID NO: 2275 - protein, 142 aa, synthetic construct
  REGION 1..142: note = Synthetic polypeptide
EVQLLESGGGLVQPGGSLRLSCAASGFTFSHYLMTWVRQAPGKGLEWVSYISPSGGHTIYADSVKGRFTISRDNSKNTLYLQMNSLRAEDTAVYYCARVAQGISGRSRLSYVDYWGQGTLVTVSSASTKGPSVFPLAPSSKS

SEQ ID NO: 2276 - protein, 109 aa, synthetic construct; identical to SEQ ID NO: 1142
  REGION 1..109: note = Synthetic polypeptide

SEQ ID NO: 2277 - protein, 142 aa, synthetic construct
  REGION 1..142: note = Synthetic polypeptide
EVQLLESGGGLVQPGGSLRLSCAASGFTFSHYLMTWVRQAPGKGLEWVSYISPSGGHTIYADSVKGRFTISRDNSKNTLYLQMNSLRAEDTAVYYCARVARGIAARSRTSYFDTWGQGTLVTVSSASTKGPSVFPLAPSSKS

SEQ ID NO: 2278 - protein, 109 aa, synthetic construct; identical to SEQ ID NO: 1142
  REGION 1..109: note = Synthetic polypeptide

SEQ ID NO: 2279 - protein, 142 aa, synthetic construct
  REGION 1..142: note = Synthetic polypeptide
EVQLLESGGGLVQPGGSLRLSCAASGFTFSHYLMTWVRQAPGKGLEWVSYISPSGGHTIYADSVKGRFTISRDNSKNTLYLQMNSLRAEDTAVYYCARVAQGIAARSRTTQFDYWGQGTLVTVSSASTKGPSVFPLAPSSKS

SEQ ID NO: 2280 - protein, 109 aa, synthetic construct; identical to SEQ ID NO: 1142
  REGION 1..109: note = Synthetic polypeptide

SEQ ID NO: 2281 - protein, 142 aa, synthetic construct
  REGION 1..142: note = Synthetic polypeptide
EVQLLESGGGLVQPGGSLRLSCAASGFTFSHYLMTWVRQAPGKGLEWVSYISPSGGHTIYADSVKGRFTISRDNSKNTLYLQMNSLRAEDTAVYYCARVARGIAARQRTSYYDYWGQGTLVTVSSASTKGPSVFPLAPSSKS

SEQ ID NO: 2282 - protein, 109 aa, synthetic construct; identical to SEQ ID NO: 1142
  REGION 1..109: note = Synthetic polypeptide

SEQ ID NO: 2283 - protein, 142 aa, synthetic construct
  REGION 1..142: note = Synthetic polypeptide
EVQLLESGGGLVQPGGSLRLSCAASGFTFSHYLMTWVRQAPGKGLEWVSYISPSGGHTIYADSVKGRFTISRDNSKNTLYLQMNSLRAEDTAVYYCARVARGIAARSRTVYFDHWGQGTLVTVSSASTKGPSVFPLAPSSKS

SEQ ID NO: 2284 - protein, 109 aa, synthetic construct; identical to SEQ ID NO: 1142
  REGION 1..109: note = Synthetic polypeptide

SEQ ID NO: 2285 - protein, 142 aa, synthetic construct
  REGION 1..142: note = Synthetic polypeptide
EVQLLESGGGLVQPGGSLRLSCAASGFTFSHYLMTWVRQAPGKGLEWVSYISPSGGHTIYADSVKGRFTISRDNSKNTLYLQMNSLRAEDTAVYYCARVARGIAARSRTSQFDYWGQGTLVTVSSASTKGPSVFPLAPSSKS

SEQ ID NO: 2286 - protein, 109 aa, synthetic construct; identical to SEQ ID NO: 1142
  REGION 1..109: note = Synthetic polypeptide

SEQ ID NO: 2287 - protein, 142 aa, synthetic construct
  REGION 1..142: note = Synthetic polypeptide
EVQLLESGGGLVQPGGSLRLSCAASGFTFSHYLMTWVRQAPGKGLEWVSYISPSGGHTIYADSVKGRFTISRDNSKNTLYLQMNSLRAEDTAVYYCASVARGIAARSRTSYFNQWGQGTLVTVSSASTKGPSVFPLAPSSKS

SEQ ID NO: 2288 - protein, 109 aa, synthetic construct; identical to SEQ ID NO: 1142
  REGION 1..109: note = Synthetic polypeptide

SEQ ID NO: 2289 - protein, 142 aa, synthetic construct
  REGION 1..142: note = Synthetic polypeptide
EVQLLESGGGLVQPGGSLRLSCAASGFTFSHYLMTWVRQAPGKGLEWVSYISPSGGHTIYADSVKGRFTISRDNSKNTLYLQMNSLRAEDTAVYYCARVAQGIAARSRTSSVDQWGQGTLVTVSSASTKGPSVFPLAPSSKS

SEQ ID NO: 2290 - protein, 109 aa, synthetic construct; identical to SEQ ID NO: 1142
  REGION 1..109: note = Synthetic polypeptide

SEQ ID NO: 2291 - protein, 142 aa, synthetic construct
  REGION 1..142: note = Synthetic polypeptide
EVQLLESGGGLVQPGGSLRLSCAASGFTFSHYLMTWVRQAPGKGLEWVSYISPSGGHTIYADSVKGRFTISRDNSKNTLYLQMNSLRAEDTAVYYCARVATGIVARSRTRYFDQWGQGTLVTVSSASTKGPSVFPLAPSSKS

SEQ ID NO: 2292 - protein, 109 aa, synthetic construct; identical to SEQ ID NO: 1142
  REGION 1..109: note = Synthetic polypeptide

SEQ ID NO: 2293 - protein, 142 aa, synthetic construct
  REGION 1..142: note = Synthetic polypeptide
EVQLLESGGGLVQPGGSLRLSCAASGFTFSHYLMTWVRQAPGKGLEWVSYISPSGGHTIYADSVKGRFTISRDNSKNTLYLQMNSLRAEDTAVYYCARVARGIAARSRTSYLDFWGQGTLVTVSSASTKGPSVFPLAPSSKS

SEQ ID NO: 2294 - protein, 109 aa, synthetic construct; identical to SEQ ID NO: 1142
  REGION 1..109: note = Synthetic polypeptide

SEQ ID NO: 2295 - protein, 142 aa, synthetic construct
  REGION 1..142: note = Synthetic polypeptide
EVQLLESGGGLVQPGGSLRLSCAASGFTFSHYLMTWVRQAPGKGLEWVSYISPSGGHTIYADSVKGRFTISRDNSKNTLYLQMNSLRAEDTAVYYCARVARGIAARSRNSQQDYWGQGTLVTVSSASTKGPSVFPLAPSSKS

SEQ ID NO: 2296 - protein, 109 aa, synthetic construct; identical to SEQ ID NO: 1142
  REGION 1..109: note = Synthetic polypeptide

SEQ ID NO: 2297 - protein, 142 aa, synthetic construct
  REGION 1..142: note = Synthetic polypeptide
EVQLLESGGGLVQPGGSLRLSCAASGFTFSHYLMTWVRQAPGKGLEWVSYISPSGGHTIYADSVKGRFTISRDNSKNTLYLQMNSLRAEDTAVYYCARVARGIAARSRTRYFDYWGQGTLVTVSSASTKGPSVFPLAPSSKS

SEQ ID NO: 2298 - protein, 109 aa, synthetic construct; identical to SEQ ID NO: 1142
  REGION 1..109: note = Synthetic polypeptide

SEQ ID NO: 2299 - protein, 142 aa, synthetic construct
  REGION 1..142: note = Synthetic polypeptide
EVQLLESGGGLVQPGGSLRLSCAASGFTFSHYLMTWVRQAPGKGLEWVSYISPSGGHTIYADSVKGRFTISRDNSKNTLYLQMNSLRAEDTAVYYCARVARGIAARSRTRYFDQWGQGTLVTVSSASTKGPSVFPLAPSSKS

SEQ ID NO: 2300 - protein, 60 aa, synthetic construct
  REGION 1..60: note = Synthetic polypeptide
EAMHSFCAFKADDGPCRAAHPRWFFNIFTRQCEEFSYGGCGGNQNRFESLEECKKMCTRD

SEQ ID NO: 2301 - protein, 12 aa, synthetic construct
  REGION 1..12: note = Synthetic peptide
RTSQFVNSNYLA

SEQ ID NO: 2302 - protein, 7 aa, synthetic construct
  REGION 1..7: note = Synthetic peptide
GASSRAT

SEQ ID NO: 2303 - protein, 9 aa, synthetic construct
  REGION 1..9: note = Synthetic peptide
QQSSRTPWT

SEQ ID NO: 2304 - protein, 5 aa, synthetic construct
  REGION 1..5: note = Synthetic peptide
HYLMT

SEQ ID NO: 2305 - protein, 17 aa, synthetic construct
  REGION 1..17: note = Synthetic peptide
YISPSGGHTIYADSVKG

SEQ ID NO: 2306 - protein, 16 aa, synthetic construct
  REGION 1..16: note = Synthetic peptide
VARGIAARSRTSYFDY

SEQ ID NO: 2307 - protein, 12 aa, synthetic construct
  REGION 1..12: note = Synthetic peptide
RTSQFVNSNYLA

SEQ ID NO: 2308 - protein, 7 aa, synthetic construct
  REGION 1..7: note = Synthetic peptide
GASSRAT

SEQ ID NO: 2309 - protein, 9 aa, synthetic construct
  REGION 1..9: note = Synthetic peptide
QQSSRTPWT

SEQ ID NO: 2310 - protein, 5 aa, synthetic construct
  REGION 1..5: note = Synthetic peptide
HYLMT

SEQ ID NO: 2311 - protein, 17 aa, synthetic construct
  REGION 1..17: note = Synthetic peptide
YISPSGGHTIYADSVKG

SEQ ID NO: 2312 - protein, 16 aa, synthetic construct
  REGION 1..16: note = Synthetic peptide
VGQGIRGRSRTSYFAQ

SEQ ID NO: 2313 - protein, 12 aa, synthetic construct
  REGION 1..12: note = Synthetic peptide
RTSQFVNSNYLA

SEQ ID NO: 2314 - protein, 7 aa, synthetic construct
  REGION 1..7: note = Synthetic peptide
GASSRAT

SEQ ID NO: 2315 - protein, 9 aa, synthetic construct
  REGION 1..9: note = Synthetic peptide
QQSSRTPWT

SEQ ID NO: 2316 - protein, 5 aa, synthetic construct
  REGION 1..5: note = Synthetic peptide
DYMMA

SEQ ID NO: 2317 - protein, 17 aa, synthetic construct
  REGION 1..17: note = Synthetic peptide
SIVPSGGHTHYADSVKG

SEQ ID NO: 2318 - protein, 16 aa, synthetic construct
  REGION 1..16: note = Synthetic peptide
VARGIAARSRTSYFDY

SEQ ID NO: 2319 - protein, 12 aa, synthetic construct
  REGION 1..12: note = Synthetic peptide
RTSQFVNSNYLA

SEQ ID NO: 2320 - protein, 7 aa, synthetic construct
  REGION 1..7: note = Synthetic peptide
GASSRAT

SEQ ID NO: 2321 - protein, 9 aa, synthetic construct
  REGION 1..9: note = Synthetic peptide
QQSSRTPWT

SEQ ID NO: 2322 - protein, 5 aa, synthetic construct
  REGION 1..5: note = Synthetic peptide
HYLMT

SEQ ID NO: 2323 - protein, 17 aa, synthetic construct
  REGION 1..17: note = Synthetic peptide
YISPSGGHTIYADSVKG

SEQ ID NO: 2324 - protein, 16 aa, synthetic construct
  REGION 1..16: note = Synthetic peptide
VAQGIAARSRTSSVDQ

SEQ ID NO: 2325 - protein, 12 aa, synthetic construct
  REGION 1..12: note = Synthetic peptide
RTSQFVNSNYLA

SEQ ID NO: 2326 - protein, 7 aa, synthetic construct
  REGION 1..7: note = Synthetic peptide
GASSRAT

SEQ ID NO: 2327 - protein, 9 aa, synthetic construct
  REGION 1..9: note = Synthetic peptide
QQSSRTPWT

SEQ ID NO: 2328 - protein, 5 aa, synthetic construct
  REGION 1..5: note = Synthetic peptide
HYLMT

SEQ ID NO: 2329 - protein, 17 aa, synthetic construct
  REGION 1..17: note = Synthetic peptide
YISPSGGHTIYADSVKG

SEQ ID NO: 2330 - protein, 16 aa, synthetic construct
  REGION 1..16: note = Synthetic peptide
VAQGISARSRTSYFDY

SEQ ID NO: 2331 - protein, 11 aa, synthetic construct
  REGION 1..11: note = Synthetic peptide
RASQSISSWLA

SEQ ID NO: 2332 - protein, 7 aa, synthetic construct
  REGION 1..7: note = Synthetic peptide
KASTLES

SEQ ID NO: 2333 - protein, 8 aa, synthetic construct
  REGION 1..8: note = Synthetic peptide
QQYNTYWT

SEQ ID NO: 2334 - protein, 5 aa, synthetic construct
  REGION 1..5: note = Synthetic peptide
HYIMM

SEQ ID NO: 2335 - protein, 17 aa, synthetic construct
  REGION 1..17: note = Synthetic peptide
GIYSSGGITVYADSVKG

SEQ ID NO: 2336 - protein, 13 aa, synthetic construct
  REGION 1..13: note = Synthetic peptide
RRTGIPRRDAFDI

SEQ ID NO: 2337 - protein, 11 aa, synthetic construct
  REGION 1..11: note = Synthetic peptide
RASQSISSWLA

SEQ ID NO: 2338 - protein, 7 aa, synthetic construct
  REGION 1..7: note = Synthetic peptide
KASTLES

SEQ ID NO: 2339 - protein, 8 aa, synthetic construct
  REGION 1..8: note = Synthetic peptide
QQYNTYWT

SEQ ID NO: 2340 - protein, 5 aa, synthetic construct
  REGION 1..5: note = Synthetic peptide
HYIMM

SEQ ID NO: 2341 - protein, 17 aa, synthetic construct
  REGION 1..17: note = Synthetic peptide
GIYSSGGITVYADSVKG

SEQ ID NO: 2342 - protein, 13 aa, synthetic construct
  REGION 1..13: note = Synthetic peptide
RRIGVPRRDSFDM

SEQ ID NO: 2343 - protein, 11 aa, synthetic construct
  REGION 1..11: note = Synthetic peptide
RASQSISSWLA

SEQ ID NO: 2344 - protein, 7 aa, synthetic construct
  REGION 1..7: note = Synthetic peptide
KASTLES

SEQ ID NO: 2345 - protein, 8 aa, synthetic construct
  REGION 1..8: note = Synthetic peptide
QQYNTYWT

SEQ ID NO: 2346 - protein, 5 aa, synthetic construct
  REGION 1..5: note = Synthetic peptide
IYSMH

SEQ ID NO: 2347 - protein, 17 aa, synthetic construct
  REGION 1..17: note = Synthetic peptide
SIYPSRGMTWYADSVKG

SEQ ID NO: 2348 - protein, 13 aa, synthetic construct
  REGION 1..13: note = Synthetic peptide
RRTGIPRRDAFDI

SEQ ID NO: 2349 - protein, 11 aa, synthetic construct
  REGION 1..11: note = Synthetic peptide
RASQSISSWLA

SEQ ID NO: 2350 - protein, 7 aa, synthetic construct
  REGION 1..7: note = Synthetic peptide
KASTLES

SEQ ID NO: 2351 - protein, 8 aa, synthetic construct
  REGION 1..8: note = Synthetic peptide
QQYNTYWT

SEQ ID NO: 2352 - protein, 5 aa, synthetic construct
  REGION 1..5: note = Synthetic peptide
HYIMM

SEQ ID NO: 2353 - protein, 17 aa, synthetic construct
  REGION 1..17: note = Synthetic peptide
GIYSSGGITVYADSVKG

SEQ ID NO: 2354 - protein, 13 aa, synthetic construct
  REGION 1..13: note = Synthetic peptide
RRIGVPRRDEFDI

SEQ ID NO: 2355 - protein, 11 aa, synthetic construct
  REGION 1..11: note = Synthetic peptide
RASQSISSWLA

SEQ ID NO: 2356 - protein, 7 aa, synthetic construct
  REGION 1..7: note = Synthetic peptide
KASTLES

SEQ ID NO: 2357 - protein, 8 aa, synthetic construct
  REGION 1..8: note = Synthetic peptide
QQYNTYWT

SEQ ID NO: 2358 - protein, 5 aa, synthetic construct
  REGION 1..5: note = Synthetic peptide
HYIMM

SEQ ID NO: 2359 - protein, 17 aa, synthetic construct
  REGION 1..17: note = Synthetic peptide
GIYSSGGITVYADSVKG

SEQ ID NO: 2360 - protein, 13 aa, synthetic construct
  REGION 1..13: note = Synthetic peptide
RRTGVPRRDEFDI

SEQ ID NO: 2361 - protein, 11 aa, synthetic construct
  REGION 1..11: note = Synthetic peptide
SGNKLGDKYVA

SEQ ID NO: 2362 - protein, 7 aa, synthetic construct
  REGION 1..7: note = Synthetic peptide
QDTKRPS

SEQ ID NO: 2363 - protein, 9 aa, synthetic construct
  REGION 1..9: note = Synthetic peptide
QAWDSSIVI

SEQ ID NO: 2364 - protein, 5 aa, synthetic construct
  REGION 1..5: note = Synthetic peptide
WYTMV

SEQ ID NO: 2365 - protein, 17 aa, synthetic construct
  REGION 1..17: note = Synthetic peptide
YIYPSGGATFYADSVKG

SEQ ID NO: 2366 - protein, 13 aa, synthetic construct
  REGION 1..13: note = Synthetic peptide
GSYDYIWGFYSDH

SEQ ID NO: 2367 - protein, 11 aa, synthetic construct
  REGION 1..11: note = Synthetic peptide
SGDKLGDKYTS

SEQ ID NO: 2368 - protein, 7 aa, synthetic construct
  REGION 1..7: note = Synthetic peptide
QDIKRPS

SEQ ID NO: 2369 - protein, 10 aa, synthetic construct
  REGION 1..10: note = Synthetic peptide
QAWDSPNARV

SEQ ID NO: 2370 - protein, 5 aa, synthetic construct
  REGION 1..5: note = Synthetic peptide
HYRMS

SEQ ID NO: 2371 - protein, 17 aa, synthetic construct
  REGION 1..17: note = Synthetic peptide
SIYPSGGRTVYADSVKG

SEQ ID NO: 2372 - protein, 19 aa, synthetic construct
  REGION 1..19: note = Synthetic peptide
DKFEWRLLFRGIGNDAFDI

SEQ ID NO: 2373 - protein, 11 aa, synthetic construct
  REGION 1..11: note = Synthetic peptide
RASQSIRNYLN

SEQ ID NO: 2374 - protein, 7 aa, synthetic construct
  REGION 1..7: note = Synthetic peptide
AASTLQS

SEQ ID NO: 2375 - protein, 9 aa, synthetic construct
  REGION 1..9: note = Synthetic peptide
QQLSGYPHT

SEQ ID NO: 2376 - protein, 5 aa, synthetic construct
  REGION 1..5: note = Synthetic peptide
FYYMV

SEQ ID NO: 2377 - protein, 17 aa, synthetic construct
  REGION 1..17: note = Synthetic peptide
VIYPSGGITVYADSVKG

SEQ ID NO: 2378 - protein, 16 aa, synthetic construct
  REGION 1..16: note = Synthetic peptide
DKWAVMPPYYYYAMDV

SEQ ID NO: 2379 - protein, 11 aa, synthetic construct
  REGION 1..11: note = Synthetic peptide
RASQSVSSYLA

SEQ ID NO: 2380 - protein, 7 aa, synthetic construct
  REGION 1..7: note = Synthetic peptide
DASNRAT

SEQ ID NO: 2381 - protein, 11 aa, synthetic construct
  REGION 1..11: note = Synthetic peptide
QQRSNWPRGFT

SEQ ID NO: 2382 - protein, 5 aa, synthetic construct
  REGION 1..5: note = Synthetic peptide
YYHMS

SEQ ID NO: 2383 - protein, 17 aa, synthetic construct
  REGION 1..17: note = Synthetic peptide
VISPSGGSTKYADSVKG

SEQ ID NO: 2384 - protein, 19 aa, synthetic construct
  REGION 1..19: note = Synthetic peptide
GGSSDYAWGSYRRPYYFDY

SEQ ID NO: 2385 - protein, 106 aa, synthetic construct; identical to SEQ ID NO: 247
  REGION 1..106: note = Synthetic polypeptide

SEQ ID NO: 2386 - protein, 107 aa, synthetic construct; identical to SEQ ID NO: 255
  REGION 1..107: note = Synthetic polypeptide

SEQ ID NO: 2387 - protein, 106 aa, synthetic construct
  REGION 1..106: note = Synthetic polypeptide
DIQMTQSPSTLSASVGDRVTITCRASQSISSWLAWYQQKPGKAPNLLIYKASTLESGVPSRFSGSGSGTEFTLTISSLQPDDFATYYCQQYNTYWTFGQGTKVEIK

SEQ ID NO: 2388 - protein, 108 aa, synthetic construct
  REGION 1..108: note = Synthetic polypeptide
EIVLTQSPGTLSLSPGERATLSCRTSQFVNSNYLAWYQQKPGQAPRLLIYGASSRATGIPDRFSGSGSGTDFTLTISRLEPEDFAVYYCQQSSRTPWTFGQGTKVEIK

SEQ ID NO: 2389 - protein, 106 aa, synthetic construct
  REGION 1..106: note = Synthetic polypeptide
DIQMTQSPSTLSASVGDRVTITCRASQSISSWLAWYQQKPGKAPKLLIYKASTLESGVPSRFSGSGSGTEFTLTISSLQPDDFATYYCQQYNTYWTFGQGTKVEIK

SEQ ID NO: 2390 - protein, 108 aa, synthetic construct; identical to SEQ ID NO: 2388
  REGION 1..108: note = Synthetic polypeptide

SEQ ID NO: 2391 - protein, 106 aa, synthetic construct; identical to SEQ ID NO: 2389
  REGION 1..106: note = Synthetic polypeptide

SEQ ID NO: 2392 - protein, 108 aa, synthetic construct; identical to SEQ ID NO: 2388
  REGION 1..108: note = Synthetic polypeptide

SEQ ID NO: 2393 - protein, 108 aa, synthetic construct; identical to SEQ ID NO: 2388
  REGION 1..108: note = Synthetic polypeptide

SEQ ID NO: 2394 - protein, 106 aa, synthetic construct; identical to SEQ ID NO: 2389
  REGION 1..106: note = Synthetic polypeptide

SEQ ID NO: 2395 - protein, 105 aa, synthetic construct
  REGION 1..105: note = Synthetic polypeptide
DIQMTQSPSTLSASVGDRVTITCRASQSISSWLAWYQQKPGKAPKLLIYKASTLESGVPSRFSGSGSGTEFTLTISSLQPDDFATYYCQQYNTYWTFGQGTKVEI

SEQ ID NO: 2396 - protein, 106 aa, synthetic construct; identical to SEQ ID NO: 2389
  REGION 1..106: note = Synthetic polypeptide

SEQ ID NO: 2397 - protein, 108 aa, synthetic construct; identical to SEQ ID NO: 2388
  REGION 1..108: note = Synthetic polypeptide

SEQ ID NO: 2398 - protein, 107 aa, synthetic construct
  REGION 1..107: note = Synthetic polypeptide
DIQMTQSPSSLSASVGDRVTITCRASQSIRNYLNWYQQKPGKAPNLLIYAASTLQSGVPARFSGSGSGTDFTLTISSLQPEDFATYYCQQLSGYPHTFGQGTKLEIK

SEQ ID NO: 2399 - protein, 110 aa, synthetic construct; identical to SEQ ID NO: 251
  REGION 1..110: note = Synthetic polypeptide

SEQ ID NO: 2400 - protein, 122 aa, synthetic construct
  REGION 1..122: note = Synthetic polypeptide
EVQLLESGGGLVQPGGSLRLSCAASGFTFSWYTMVWVRQAPGKGLEWVSYIYPSGGATFYADSVKGRFTISRDNSKNTLYLQMNSLRAEDTAVYYCAMGSYDYIWGFYSDHWGQGTLVTVSS

SEQ ID NO: 2401 - protein, 128 aa, synthetic construct
  REGION 1..128: note = Synthetic polypeptide
EVQLLESGGGLVQPGGSLRLSCAASGFTFSHYRMSWVRQAPGKGLEWVSSIYPSGGRTVYADSVKGRFTISRDNSKNTLYLQMNSLRAEDTAVYYCAKDKFEWRLLFRGIGNDAFDIWGQGTMVTVSS

SEQ ID NO: 2402 - protein, 122 aa, synthetic construct
  REGION 1..122: note = Synthetic polypeptide
EVQLLESGGGLVQPGGSLRLSCAASGFTFSHYIMMWVRQAPGKGLEWVSGIYSSGGITVYADSVKGRFTISRDNSKNTLYLQMNSLRAEDTAVYYCAYRRTGIPRRDAFDIWGQGTMVTVSS

SEQ ID NO: 2403 - protein, 125 aa, synthetic construct
  REGION 1..125: note = Synthetic polypeptide
EVQLLESGGGLVQPGGSLRLSCAASGFTFSHYLMTWVRQAPGKGLEWVSYISPSGGHTIYADSVKGRFTISRDNSKNTLYLQMNSLRAEDTAVYYCARVARGIAARSRTSYFDYWGQGTLVTVSS

SEQ ID NO: 2404 - protein, 122 aa, synthetic construct
  REGION 1..122: note = Synthetic polypeptide
EVQLLESGGGLVQPGGSLRLSCAASGFTFSHYIMMWVRQAPGKGLEWVSGIYSSGGITVYADSVKGRFTISRDNSKNTLYLQMNSLRAEDTAVYYCAWRRIGVPRRDSFDMWGQGTMVTVSS

SEQ ID NO: 2405 - protein, 125 aa, synthetic construct
  REGION 1..125: note = Synthetic polypeptide
EVQLLESGGGLVQPGGSLRLSCAASGFTFSHYLMTWVRQAPGKGLEWVSYISPSGGHTIYADSVKGRFTISRDNSKNTLYLQMNSLRAEDTAVYYCAMVGQGIRGRSRTSYFAQWGQGTLVTVSS

SEQ ID NO: 2406 - protein, 122 aa, synthetic construct
  REGION 1..122: note = Synthetic polypeptide
EVQLLESGGGLVQPGGSLRLSCAASGFTFSIYSMHWVRQAPGKGLEWVSSIYPSRGMTWYADSVKGRFTISRDNSKNTLYLQMNSLRAEDTAVYYCAYRRTGIPRRDAFDIWGQGTMVTVSS

SEQ ID NO: 2407 - protein, 125 aa, synthetic construct
  REGION 1..125: note = Synthetic polypeptide
EVQLLESGGGLVQPGGSLRLSCAASGFTFSDYMMAWVRQAPGKGLEWVSSIVPSGGHTHYADSVKGRFTISRDNSKNTLYLQMNSLRAEDTAVYYCARVARGIAARSRTSYFDYWGQGTLVTVSS

SEQ ID NO: 2408 - protein, 125 aa, synthetic construct
  REGION 1..125: note = Synthetic polypeptide
EVQLLESGGGLVQPGGSLRLSCAASGFTFSHYLMTWVRQAPGKGLEWVSYISPSGGHTIYADSVKGRFTISRDNSKNTLYLQMNSLRAEDTAVYYCARVAQGIAARSRTSSVDQWGQGTLVTVSS

SEQ ID NO: 2409 - protein, 122 aa, synthetic construct
  REGION 1..122: note = Synthetic polypeptide
EVQLLESGGGLVQPGGSLRLSCAASGFTFSHYIMMWVRQAPGKGLEWVSGIYSSGGITVYADSVKGRFTISRDNSKNTLYLQMNSLRAEDTAVYYCAYRRIGVPRRDEFDIWGQGTMVTVSS

SEQ ID NO: 2410 - protein, 122 aa, synthetic construct; identical to SEQ ID NO: 2409
  REGION 1..122: note = Synthetic polypeptide

SEQ ID NO: 2411 - protein, 122 aa, synthetic construct
  REGION 1..122: note = Synthetic polypeptide
EVQLLESGGGLVQPGGSLRLSCAASGFTFSHYIMMWVRQAPGKGLEWVSGIYSSGGITVYADSVKGRFTISRDNSKNTLYLQMNSLRAEDTAVYYCAYRRTGVPRRDEFDIWGQGTMVTVSS

SEQ ID NO: 2412 - protein, 125 aa, synthetic construct
  REGION 1..125: note = Synthetic polypeptide
EVQLLESGGGLVQPGGSLRLSCAASGFTFSHYLMTWVRQAPGKGLEWVSYISPSGGHTIYADSVKGRFTISRDNSKNTLYLQMNSLRAEDTAVYYCARVAQGISARSRTSYFDYWGQGTLVTVSS

SEQ ID NO: 2413 - protein, 125 aa, synthetic construct
  REGION 1..125: note = Synthetic polypeptide
EVQLLESGGGLVQPGGSLRLSCAASGFTFSFYYMVWVRQAPGKGLEWVSVIYPSGGITVYADSVKGRFTISRDNSKNTLYLQMNSLRAEDTAVYYCARDKWAVMPPYYYYAMDVWGQGTTVTVSS

SEQ ID NO: 2414 - protein, 128 aa, synthetic construct
  REGION 1..128: note = Synthetic polypeptide
EVQLLESGGGLVQPGGSLRLSCAASGFTFSYYHMSWVRQAPGKGLEWVSVISPSGGSTKYADSVKGRFTISRDNSKNTLYLQMNSLRAEDTAVYYCARGGSSDYAWGSYRRPYYFDYWGQGTLVTVSS

SEQ ID NO: 2415 - DNA, 318 bp, synthetic construct
  misc_feature 1..318: note = Synthetic polynucleotide
  source 1..318: mol_type = other DNA
cagagcgctttgactcagccacccacagtgtctgtgtccccaggacagacagccaggatcacctgctctggaaataaattgggggataaatatgttgcctggtatcagcagaagccaggccagtcccctatgttggtcatctatcaagatactaagcgcccctcaagagtttctgagcgattctctggctccaactctgcgaatacagccactctgtccatcagcgggacccaggctctggatgaggctgactattactgtcaggcgtgggacagcagcattgtgatcttcggcggagggaccaggctgaccgtccta

SEQ ID NO: 2416 - DNA, 321 bp, synthetic construct
  misc_feature 1..321: note = Synthetic polynucleotide
  source 1..321: mol_type = other DNA
cagagcgtcttgactcagccaccctcagtgtccgtgtctccaggacagacagccagcatcacctgctctggagataaattgggggataaatatacttcctggtatcagcagaggccaggccagtcccctgtattggtcatctatcaagatatcaagcggccctcagggatccctgagcgattctctggctccaactctgggaacacagccactctgaccatcagcgggacccaggctatggatgaggctgactattactgtcaggcgtgggacagtcccaatgcgagggtcttcggatctgggaccaaggtcaccgtccta

SEQ ID NO: 2417 - DNA, 318 bp, synthetic construct
  misc_feature 1..318: note = Synthetic polynucleotide
  source 1..318: mol_type = other DNA
gacatccagatgacccagtctccttccaccctgtctgcatctgtaggagacagagtcaccatcacttgccgggccagtcagagtatcagtagttggttggcctggtatcagcagaaaccagggaaagcccctaacctcctgatctataaggcgtctactttagaaagtggggtcccatcaaggttcagcggcagtggatctgggacagaattcactctcaccatcagcagcctgcagcctgatgattttgcaacttattactgccaacagtataatacttattggacgttcggccaagggaccaaggtggaaatcaaa

SEQ ID NO: 2418 - DNA, 324 bp, synthetic construct
  misc_feature 1..324: note = Synthetic polynucleotide
  source 1..324: mol_type = other DNA
gagatcgtgctgacccagtcccctggcaccctgtctctgtctcccggcgagagagccaccctgtcctgccggacctcccagttcgtgaactccaactacctggcttggtatcagcagaagccaggccaggcccctagactgctgatctacggcgcctcttccagagccaccggcatccctgaccggttctccggctctggctccggcaccgacttcaccctgaccatctcccggctggaacctgaggacttcgccgtgtactactgccagcagtcctcccggaccccttggacctttggccagggcaccaaggtggagatcaag

SEQ ID NO: 2419 - DNA, 318 bp, synthetic construct
  misc_feature 1..318: note = Synthetic polynucleotide
  source 1..318: mol_type = other DNA
gacatccagatgacccagtccccctccaccctgtccgcctctgtgggcgacagagtgaccatcacctgtcgggcctcccagtccatctccagctggctggcctggtatcagcagaagcccggcaaggcccccaagctgctgatctacaaggccagcaccctggaatccggcgtgccctccagattctccggctctggctccggcaccgagttcaccctgaccatcagctccctgcagcccgacgacttcgccacctactactgccagcagtacaacacctactggaccttcggccagggcaccaaggtggaaatcaag

SEQ ID NO: 2420 - DNA, 324 bp, synthetic construct; identical to SEQ ID NO: 2418
  misc_feature 1..324: note = Synthetic polynucleotide
  source 1..324: mol_type = other DNA

SEQ ID NO: 2421 - DNA, 318 bp, synthetic construct; identical to SEQ ID NO: 2419
  misc_feature 1..318: note = Synthetic polynucleotide
  source 1..318: mol_type = other DNA

SEQ ID NO: 2422 - DNA, 324 bp, synthetic construct; identical to SEQ ID NO: 2418
  misc_feature 1..324: note = Synthetic polynucleotide
  source 1..324: mol_type = other DNA

SEQ ID NO: 2423 - DNA, 324 bp, synthetic construct; identical to SEQ ID NO: 2418
  misc_feature 1..324: note = Synthetic polynucleotide
  source 1..324: mol_type = other DNA

SEQ ID NO: 2424 - DNA, 318 bp, synthetic construct; identical to SEQ ID NO: 2419
  misc_feature 1..318: note = Synthetic polynucleotide
  source 1..318: mol_type = other DNA

SEQ ID NO: 2425 - DNA, 318 bp, synthetic construct; identical to SEQ ID NO: 2419
  misc_feature 1..318: note = Synthetic polynucleotide
  source 1..318: mol_type = other DNA

SEQ ID NO: 2426 - DNA, 324 bp, synthetic construct; identical to SEQ ID NO: 2418
  misc_feature 1..324: note = Synthetic polynucleotide
  source 1..324: mol_type = other DNA

SEQ ID NO: 2427 - DNA, 321 bp, synthetic construct
  misc_feature 1..321: note = Synthetic polynucleotide
  source 1..321: mol_type = other DNA
gacatccagatgacccagtctccatcctccctgtctgcatctgtaggagacagagtcaccatcacttgccgggcaagtcagagtattcgcaactatttaaattggtatcagcagaaaccagggaaagcccctaacctcctgatctatgctgcatccactttgcaaagtggggtcccagcaaggttcagtggcagtggatctgggacagatttcactctcactatcagcagtctgcagcctgaagattttgcaacttattactgtcaacagcttagtggttacccccacacttttggccaggggaccaagctggagatcaaa

SEQ ID NO: 2428 - DNA, 330 bp, synthetic construct
  misc_feature 1..330: note = Synthetic polynucleotide
  source 1..330: mol_type = other DNA
caagacatccagatgacccagtctccagccaccctgtctttgtctccaggggaaagagccaccctctcctgcagggccagtcagagtgttagcagctacttagcctggtaccaacagaaacctggccaggctcccaggctcctcatctatgatgcatccaacagggccactggcatcccagccaggttcagtggcagtgggtctgggacagacttcactctcaccatcagcagcctagagcctgaagattttgcagtttattactgtcagcagcgtagcaactggcctcgcggattcactttcggccctgggaccaaagtggatatcaaa

SEQ ID NO: 2429 - DNA, 366 bp, synthetic construct
  misc_feature 1..366: note = Synthetic polynucleotide
  source 1..366: mol_type = other DNA
gaagttcaattgttagagtctggtggcggtcttgttcagcctggtggttctttacgtctttcttgcgctgcttccggattcactttctcttggtacactatggtttgggttcgccaagctcctggtaaaggtttggagtgggtttcttatatctatccttctggtggcgctactttttatgctgactccgttaaaggtcgcttcactatctctagagacaactctaagaatactctctacttgcagatgaacagcttaagggctgaggacacggccgtgtattactgtgcgatgggttcatatgattacatttggggattttatagtgaccactggggccagggaaccctggtcaccgtctcaagc

SEQ ID NO: 2430 - DNA, 384 bp, synthetic construct
  misc_feature 1..384: note = Synthetic polynucleotide
  source 1..384: mol_type = other DNA
gaagttcaattgttagagtctggtggcggtcttgttcagcctggtggttctttacgtctttcttgcgctgcttccggattcactttctctcattaccgtatgtcttgggttcgccaagctcctggtaaaggtttggagtgggtttcttctatctatccttctggtggccgtactgtttatgctgactccgttaaaggtcgcttcactatctctagagacaactctaagaatactctctacttgcagatgaacagcttaagggctgaggacacggccgtgtattactgtgcgaaagataagttcgagtggaggttattatttcgcgggattggaaatgatgcttttgatatctggggccaagggacaatggtcaccgtctcaagc

SEQ ID NO: 2431 - DNA, 366 bp, synthetic construct
  misc_feature 1..366: note = Synthetic polynucleotide
  source 1..366: mol_type = other DNA
gaagttcaattgttagagtctggtggcggtcttgttcagcctggtggttctttacgtctttcttgcgctgcttccggattcactttctctcattacattatgatgtgggttcgccaagctcctggtaaaggtttggagtgggtttctggtatctattcttctggtggcattactgtttatgctgactccgttaaaggtcgcttcactatctctagagacaactctaagaatactctctacttgcagatgaacagcttaagggctgaggacacggccgtgtattactgtgcgtaccgccggactgggattccaagaagagatgcttttgatatctggggccaagggacaatggtcaccgtctcaagc

SEQ ID NO: 2432 - DNA, 375 bp, synthetic construct
  misc_feature 1..375: note = Synthetic polynucleotide
  source 1..375: mol_type = other DNA
gaggtgcaattgctggaatccggcggaggtctggtgcagcctggcggctccctgagactgtcttgcgccgcctccggcttcaccttctcccactacctgatgacctgggtgcgccaggctcctggcaagggcctcgaatgggtgtcctacatctccccctctggcggccacaccatctacgccgactccgtgaagggccggttcaccatctcccgggacaactccaagaacaccctgtatctgcagatgaactccctgagggccgaggacaccgccgtgtactactgcgccagggtggccagaggaatcgccgccaggtcccggacctcctacttcgactactggggccagggcaccctggtgaccgtgtcctcc

SEQ ID NO: 2433 - DNA, 366 bp, synthetic construct
  misc_feature 1..366: note = Synthetic polynucleotide
  source 1..366: mol_type = other DNA
gaggtgcaattgctggaatccggcggaggactggtgcagcctggcggctccctgagactgtcttgcgccgcctccggctttaccttctcccactacatcatgatgtgggtgcgacaggctccaggcaagggcctggaatgggtgtccggcatctactcctccggcggcatcaccgtgtacgccgactccgtgaagggccggttcaccatctcccgggacaactccaagaacaccctgtacctgcagatgaactccctgcgggccgaggacaccgccgtgtactactgtgcctggcggagaatcggcgtgcccagacgggactccttcgacatgtggggacagggcaccatggtgacagtgtcctcc

SEQ ID NO: 2434 - DNA, 375 bp, synthetic construct
  misc_feature 1..375: note = Synthetic polynucleotide
  source 1..375: mol_type = other DNA
gaggtgcaattgctggaatccggcggaggactggtgcagcctggcggctccctgagactgtcttgcgccgcctccggcttcaccttctcccactacctgatgacctgggtgcgacaggctcctggcaaaggcctggaatgggtgtcctacatctccccctctggcggccacaccatctacgccgactccgtgaagggccggtttaccatctcccgggacaactccaagaacaccctgtacctgcagatgaactccctgcgggccgaggacaccgccgtgtactactgtgccatggtcggccagggaatccggggcagatcccggacctcctacttcgcccagtggggccagggcaccctggtgacagtgtcctct

SEQ ID NO: 2435 - DNA, 366 bp, synthetic construct
  misc_feature 1..366: note = Synthetic polynucleotide
  source 1..366: mol_type = other DNA
gaggtgcaattgctggaatccggcggaggactggtgcagcctggcggctccctgagactgtcttgcgccgcctccggcttcaccttctccatctactccatgcactgggtgcgacaggctccaggcaagggcctggaatgggtgtcctccatctacccctcccggggcatgacttggtacgccgactccgtgaagggccggttcacaatctcccgggacaactccaagaacaccctgtacctgcagatgaactccctgcgggccgaggacaccgccgtgtactactgcgcctaccggcggaccggcatccctagacgggacgccttcgacatctgggggcagggcaccatggtgacagtgtcctcc

SEQ ID NO: 2436 - DNA, 375 bp, synthetic construct
  misc_feature 1..375: note = Synthetic polynucleotide
  source 1..375: mol_type = other DNA
gaggtgcaattgctggaatccggcggtggactggtgcagcctggcggctccctgagactgtcttgcgccgcctccggcttcaccttctccgactacatgatggcctgggtgcgacaggcccctggcaagggactggaatgggtgtcctccatcgtgccctctggcggccacacccactacgccgactccgtgaagggccggttcaccatctcccgggacaactccaagaacaccctgtacctgcagatgaactccctgcgggccgaggacaccgccgtgtactactgcgccagagtggccagaggaatcgccgccagatcccggacctcctacttcgactactggggccagggcaccctggtgacagtgtcctcc

SEQ ID NO: 2437 - DNA, 375 bp, synthetic construct
  misc_feature 1..375: note = Synthetic polynucleotide
  source 1..375: mol_type = other DNA
gaggtgcaattgctggaatccggcggaggactggtgcagcctggcggctccctgagactgtcttgcgccgcctccggcttcaccttctcccactacctgatgacctgggtgcgacaggctcctggcaaaggcctggaatgggtgtcctacatctccccctctggcggccacaccatctacgccgactccgtgaagggccggtttaccatctcccgggacaactccaagaacaccctgtacctgcagatgaactccctgcgggccgaggacaccgccgtgtactactgtgcccgggtggcccagggaatcgccgccagatcccggacctcctctgtggatcagtggggccagggcaccctggtgacagtgtcctct

SEQ ID NO: 2438 - DNA, 366 bp, synthetic construct
  misc_feature 1..366: note = Synthetic polynucleotide
  source 1..366: mol_type = other DNA
gaggtgcaattgctggaatccggcggaggactggtgcagcctggcggctccctgagactgtcttgcgccgcctccggcttcaccttctcccactacatcatgatgtgggtgcgacaggctcctggcaaggggctggaatgggtgtccggcatctactcctccggcggcatcaccgtgtacgccgactccgtgaagggccggttcaccatctctcgggacaactccaagaacaccctgtacctgcagatgaactccctgcgggccgaggacaccgccgtgtactactgcgcctaccggcggatcggcgtgcccagacgggacgagttcgacatctgggggcagggcaccatggtgacagtgtcctcc

SEQ ID NO: 2439 - DNA, 366 bp, synthetic construct
  misc_feature 1..366: note = Synthetic polynucleotide
  source 1..366: mol_type = other DNA
gaggtgcaattgctggaatccggcggaggactggtgcagcctggcggctccctgagactgtcttgcgccgcctccggcttcaccttctctcactacattatgatgtgggtgcgacaggctcctggcaaaggcctggaatgggtgtccggcatctactcctccggcggcatcaccgtgtacgccgactccgtgaagggccggttcaccatctcccgggacaactccaagaacaccctgtacctgcagatgaactccctgcgggccgaggacaccgccgtgtactactgcgcctacagacggaccggcgtgcccagacgggacgagttcgatatctgggggcagggcaccatggtgacagtgtcctcc

SEQ ID NO: 2440 - DNA, 375 bp, synthetic construct
  misc_feature 1..375: note = Synthetic polynucleotide
  source 1..375: mol_type = other DNA
gaggtgcaattgctggaatccggcggaggactggtgcagcctggcggctccctgagactgtcttgcgccgcctccggcttcaccttctcccactacctgatgacctgggtgcgacaggctcctggcaaaggcctggaatgggtgtcctacatctccccctctggcggccacaccatctacgccgactccgtgaagggccggtttaccatctcccgggacaactccaagaacaccctgtacctgcagatgaactccctgcgggccgaggacaccgccgtgtactactgtgcccgggtggcccagggaatctccgccagatcccggacctcctacttcgattactggggccagggcaccctggtgacagtgtcctct

SEQ ID NO: 2441 - DNA, 375 bp, synthetic construct
  misc_feature 1..375: note = Synthetic polynucleotide
  source 1..375: mol_type = other DNA
gaagttcaattgttagagtctggtggcggtcttgttcagcctggtggttctttacgtctttcttgcgctgcttccggattcactttctctttttactatatggtttgggttcgccaagctcctggtaaaggtttggagtgggtttctgttatctatccttctggtggcattactgtttatgctgactccgttaaaggtcgcttcactatctctagagacaactctaagaatactctctacttgcagatgaacagcttaagggctgaggacacggccgtgtattactgtgcgagagataaatgggcggtgatgcccccctactactactacgctatggacgtctggggccaagggaccacggtcaccgtctcaagc

SEQ ID NO: 2442 - DNA, 384 bp, synthetic construct
  misc_feature 1..384: note = Synthetic polynucleotide
  source 1..384: mol_type = other DNA
gaagttcaattgttagagtctggtggcggtcttgttcagcctggtggttctttacgtctttcttgcgctgcttccggattcactttctcttattaccatatgtcttgggttcgccaagctcctggtaaaggtttggagtgggtttctgttatctctccttctggtggctctactaagtatgctgactccgttaaaggtcgcttcactatctctagagacaactctaagaatactctctacttgcagatgaacagcttaagggctgaggacactgcagtctactattgtgcgagaggcggttcgagcgattacgcttgggggagttatcgtcgaccctactactttgactactggggccagggaaccctggtcaccgtctcaagc

SEQ ID NO: 2443-2466 - skipped (24 entries)

SEQ ID NO: 2467 - DNA, 2268 bp, synthetic construct
  misc_feature 1..2268: note = Synthetic polynucleotide
  source 1..2268: mol_type = other DNA
gacgaaagggcctcgtgatacgcctatttttataggttaatgtcatgataataatggtttcttagacgtcaggtggcacttttcggggaaatgtgcgcggaacccctatttgtttatttttctaaatacattcaaatatgtatccgctcatgagacaataaccctgataaatgcttcaataatattgaaaaaggaagagtatgagtattcaacatttccgtgtcgcccttattcccttttttgcggcattttgccttcctgtttttgctcacccagaaacgctggtgaaagtaaaagatgctgaagatcagttgggtgcccgagtgggttacatcgaactggatctcaacagcggtaagatccttgagagttttcgccccgaagaacgttttccaatgatgagcacttttaaagttctgctatgtggcgcggtattatcccgtattgacgccgggcaagagcaactcggtcgccgcatacactattctcagaatgacttggttgagtactcaccagtcacagaaaagcatcttacggatggcatgacagtaagagaattatgcagtgctgccataaccatgagtgataacactgcggccaacttacttctgacaacgatcggaggaccgaaggagctaaccgcttttttgcacaacatgggggatcatgtaactcgccttgatcgttgggaaccggagctgaatgaagccataccaaacgacgagcgtgacaccacgatgcctgtagcaatggcaacaacgttgcgcaaactattaactggcgaactacttactctagcttcccggcaacaattaatagactggatggaggcggataaagttgcaggaccacttctgcgctcggcccttccggctggctggtttattgctgataaatctggagccggtgagcgtgggtctcgcggtatcattgcagcactggggccagatggtaagccctcccgtatcgtagttatctacacgacggggagtcaggcaactatggatgaacgaaatagacagatcgctgagataggtgcctcactgattaagcattggtaactgtcagaccaagtttactcatatatactttagattgatttaaaacttcatttttaatttaaaaggatctaggtgaagatcctttttgataatctcatgaccaaaatcccttaacgtgagttttcgttccactgagcgtcagaccccgtagaaaagatcaaaggatcttcttgagatcctttttttctgcgcgtaatctgctgcttgcaaacaaaaaaaccaccgctaccagcggtggtttgtttgccggatcaagagctaccaactctttttccgaaggtaactggcttcagcagagcgcagataccaaatactgttcttctagtgtagccgtagttaggccaccacttcaagaactctgtagcaccgcctacatacctcgctctgctaatcctgttaccagtggctgctgccagtggcgataagtcgtgtcttaccgggttggactcaagacgatagttaccggataaggcgcagcggtcgggctgaacggggggttcgtgcatacagcccagcttggagcgaacgacctacaccgaactgagatacctacagcgtgagctatgagaaagcgccacgcttcccgaagggagaaaggcggacaggtatccggtaagcggcagggtcggaacaggagagcgcacgagggagcttccagggggaaacgcctggtatctttatagtcctgtcgggtttcgccacctctgacttgagcgtcgatttttgtgatgctcgtcaggggggcggagcctatggaaaaacgccagcaacgcggcctttttacggttcctggccttttgctggccttttgctcacatgttctttcctgcgttatcccctgattctgtggataaccgtattaccgcctttgagtgagctgataccgctcgccgcagccgaacgaccgagcgcagcgagtcagtgagcgaggaagcggaagagcgcccaatacgcaaaccgcctctccccgcgcgttggccgattcattaatgcagctggcacgacaggtttcccgactggaaagcgggcagtgagcgcaacgcaattaatgtgagttagctcactcattaggcaccccaggctttacactttatgcttccggctcgtatgttgtgtggaattgtgagcggataacaatttcacacaggaaacagctatgaccatgattacgccaagctttggagccttttttttggagattttcaac

SEQ ID NO: 2468 - protein, 108 aa, synthetic construct; identical to SEQ ID NO: 275
  REGION 1..108: note = Synthetic polypeptide

SEQ ID NO: 2469 - DNA, 1380 bp, synthetic construct
  misc_feature 1..1380: note = Synthetic polynucleotide
  source 1..1380: mol_type = other DNA
  CDS 1..1341: protein_id = 2470
atgaaaaaattattattcgcaattcctttagttgttcctttctattctcacagtgcacaagacatccagatgacccagtctccatccttcctgtctgcatctgtaggagacagagtcaccatcacttgccgggccagtcagggcattagcagttatttagcctggtatcagcaaaaaccagggaaagcccctaagctcctgatctatgctgcatccactttgcaaagtggggtcccatcaaggttcagcggcagtggatctgggacagaattcactctcacaatcagcagcctgcagcctgaagattttgcaacttattactgtcaacagcttaatagttaccctctcactttcggcggagggaccaaggtggagatcaaacgaactgtggctgcaccatctgtcttcatcttcccgccatctgatgagcagttgaaatctggaactgcctctgttgtgtgcctgctgaataacttctatcccagagaggccaaagtacagtggaaggtggataacgccctccaatcgggtaactcccaggagagtgtcacagagcaggacagcaaggacagcacctacagcctcagcagcaccctgacgctgagcaaagcagactacgagaaacacaaagtctacgcctgcgaagtcacccatcagggcctgagttcaccggtgacaaagagcttcaacaggggagagtgtggtaccgcttctactgccaccactggtcctgctcctactgaatcccctgctccgggtccttctggtgctcctggctctactggtcctggtgagccgagtcctagtgaagccaccactcctgctcctggtactccgtctcctacttccggccctgagggtgctaccggtgaaggtgctgccggcgagcctccgccttctggtactggtcctgctgctgcttctcctggtggcccgcctggtgaaactgccagtggtcctgctagtactggtggcaccggttctactgctactcctacttcctctgctgagtctccggccggtactgaacctagtagtggtcctgaggaaccttctgaggaaccggctactgaggctgctggcggtactactaccgaagcctccggtactactggtacttctgagaccgcttctcctgaagaggaagctcctagtgctagtgccactcctggcgagactggtactccggaacctggtgctcctggtactcctccgactggcgctggttcttccgagcctgctggttctggtggctctggtagtactcctgccagtgaggcttcttcctctcctgcttctactgctggtagtagtaccgccggtgaggaaccgcctccttaataaggcgcgcctaaccatctatttcaaggaacagtctta

SEQ ID NO: 2470 - protein, 446 aa, synthetic construct [sequence omitted]

SEQ ID NO: 2471 - protein, 142 aa, synthetic construct; identical to SEQ ID NO: 276
  REGION 1..142: note = Synthetic polypeptide

SEQ ID NO: 2472 - DNA, 2284 bp, synthetic construct
  misc_feature 1..2284: note = Synthetic polynucleotide
  source 1..2284: mol_type = other DNA
  CDS 1..1389: protein_id = 2473
atgaaaaagcttttattcatgatcccgttagttgtaccgttcgtggcccagccggccatggccgaagttcaattgttagagtctggtggcggtcttgttcagcctggtggttctttacgtctttcttgcgctgcttccggattcactttctctcattaccttatgacttgggttcgccaagctcctggtaaaggtttggagtgggtttcttatatctctccttctggtggccatactatttatgctgactccgttaaaggtcgcttcactatctctagagacaactctaagaatactctctacttgcagatgaacagcttaagggctgaggacacggccgtgtattactgtgcgagagtggcccgggggatagcagctcgatcgcgaaccagctactttgactactggggccagggaaccctggtcaccgtctcaagcgcctccaccaagggcccatcggtcttcccgctagcaccctcctccaagagcacctctgggggcacagcggccctgggctgcctggtcaaggactacttccccgaaccggtgacggtgtcgtggaactcaggcgccctgaccagcggcgtccacaccttcccggctgtcctacagtctagcggactctactccctcagcagcgtagtgaccgtgccctcttctagcttgggcacccagacctacatctgcaacgtgaatcacaagcccagcaacaccaaggtggacaagaaagttgagcccaaatcttgtgcggccgcttctcctgctactgcttccgcttctactgccccggctactgctacccctgagtctgctgaaggcgccactactgagactcctaccactgaaactcctgctgagagtgctagtggtccgcctgctccttctgaatccgccactgaggaatctggtgaggcttctaccagtagtactgctgaagagggtcctgctgaaccgggctctcctgcccctactcctgctgctactccggctgagacctcctctgaacctcctgaggaacctggtggtgccggtactccggctggcactactaccggtgctgagactgaatctgctactgagggtggtgccagtagtgctcctgcttctcctactggcggtgctccttcctctggtgaaaccactactgagggtggcccggccggtcctgctcctgctactgctgcccctaccggtggtggcgctggtggtgaaggttctgctggcggtggtactggtgaggaaggcggtggtggtgctccggagggcagtggtggtggtcctgaaggccctactcctgccactgaggctagtccggaaggtgctcctcctggttctacctccacttctggtcctggcgaggctgcctctccgactagtagtcctggttaatgataaaacgcgtgatgagaattcactggccgtcgttttacaacgtcgtgactgggaaaaccctggcgttacccaacttaatcgccttgcagcacatccccctttcgccagctggcgtaatagcgaagaggcccgcaccgatcgcccttcccaacagttgcgcagcctgaatggcgaatggcgcctgatgcggtattttctccttacgcatctgtgcggtatttcacaccgcatacgtcaaagcaaccatagtacgcgccctgtagcggcgcattaagcgcggcgggtgtggtggttacgcgcagcgtgaccgctacacttgccagcgccttagcgcccgctcctttcgctttcttcccttcctttctcgccacgttcgccggctttccccgtcaagctctaaatcgggggctccctttagggttccgatttagtgctttacggcacctcgaccccaaaaaacttgatttgggtgatggttcacgtagtgggccatcgccctgatagacggtttttcgccctttgacgttggagtccacgttctttaatagtggactcttgttccaaactggaacaacactcaactctatctcgggctattcttttgatttataagggattttgccgatttcggtctattggttaaaaaatgagctgatttaacaaaaatttaacgcgaattttaacaaaatattaacgtttacaattttatggtgcagtctcagtacaatctgctctgatgccgcatagttaagccagccccgacacccgccaacacccgctgacgcgccctgacgggcttgtctgctcccggcatccgcttacagacaagctgtgaccgtctccgggagctgcatgtgtcagaggttttcaccgtcatcaccgaaacgcgcga

SEQ ID NO: 2473 - protein, 462 aa, synthetic construct [sequence omitted]

SEQ ID NO: 2474 - DNA, 5932 bp, synthetic construct
  misc_feature 1..5932: note = Synthetic polynucleotide
  source 1..5932: mol_type = other DNA
gacgaaagggcctcgtgatacgcctatttttataggttaatgtcatgataataatggtttcttagacgtcaggtggcacttttcggggaaatgtgcgcggaacccctatttgtttatttttctaaatacattcaaatatgtatccgctcatgagacaataaccctgataaatgcttcaataatattgaaaaaggaagagtatgagtattcaacatttccgtgtcgcccttattcccttttttgcggcattttgccttcctgtttttgctcacccagaaacgctggtgaaagtaaaagatgctgaagatcagttgggtgcccgagtgggttacatcgaactggatctcaacagcggtaagatccttgagagttttcgccccgaagaacgttttccaatgatgagcacttttaaagttctgctatgtggcgcggtattatcccgtattgacgccgggcaagagcaactcggtcgccgcatacactattctcagaatgacttggttgagtactcaccagtcacagaaaagcatcttacggatggcatgacagtaagagaattatgcagtgctgccataaccatgagtgataacactgcggccaacttacttctgacaacgatcggaggaccgaaggagctaaccgcttttttgcacaacatgggggatcatgtaactcgccttgatcgttgggaaccggagctgaatgaagccataccaaacgacgagcgtgacaccacgatgcctgtagcaatggcaacaacgttgcgcaaactattaactggcgaactacttactctagcttcccggcaacaattaatagactggatggaggcggataaagttgcaggaccacttctgcgctcggcccttccggctggctggtttattgctgataaatctggagccggtgagcgtgggtctcgcggtatcattgcagcactggggccagatggtaagccctcccgtatcgtagttatctacacgacggggagtcaggcaactatggatgaacgaaatagacagatcgctgagataggtgcctcactgattaagcattggtaactgtcagaccaagtttactcatatatactttagattgatttaaaacttcatttttaatttaaaaggatctaggtgaagatcctttttgataatctcatgaccaaaatcccttaacgtgagttttcgttccactgagcgtcagaccccgtagaaaagatcaaaggatcttcttgagatcctttttttctgcgcgtaatctgctgcttgcaaacaaaaaaaccaccgctaccagcggtggtttgtttgccggatcaagagctaccaactctttttccgaaggtaactggcttcagcagagcgcagataccaaatactgttcttctagtgtagccgtagttaggccaccacttcaagaactctgtagcaccgcctacatacctcgctctgctaatcctgttaccagtggctgctgccagtggcgataagtcgtgtcttaccgggttggactcaagacgatagttaccggataaggcgcagcggtcgggctgaacggggggttcgtgcatacagcccagcttggagcgaacgacctacaccgaactgagatacctacagcgtgagctatgagaaagcgccacgcttcccgaagggagaaaggcggacaggtatccggtaagcggcagggtcggaacaggagagcgcacgagggagcttccagggggaaacgcctggtatctttatagtcctgtcgggtttcgccacctctgacttgagcgtcgatttttgtgatgctcgtcaggggggcggagcctatggaaaaacgccagcaacgcggcctttttacggttcctggccttttgctggccttttgctcacatgttctttcctgcgttatcccctgattctgtggataaccgtattaccgcctttgagtgagctgataccgctcgccgcagccgaacgaccgagcgcagcgagtcagtgagcgaggaagcggaagagcgcccaatacgcaaaccgcctctccccgcgcgttggccgattcattaatgcagctggcacgacaggtttcccgactggaaagcgggcagtgagcgcaacgcaattaatgtgagttagctcactcattaggcaccccaggctttacactttatgcttccggctcgtatgttgtgtggaattgtgagcggataacaatttcacacaggaaacagctatgaccatgattacgccaagctttggagccttttttttggagattttcaacatgaaaaaattattattcgcaattcctttagttgttcctttctattctcacagtgcacaagacatccagatgacccagtctccatccttcctgtctgcatctgtaggagacagagtcaccatcacttgccgggccagtcagggcattagcagttatttagcctggtatcagcaaaaaccagggaaagcccctaagctcctgatctatgctgcatccactttgcaaagtggggtcccatcaaggttcagcggcagtggatctgggacagaattcactctcacaatcagcagcctgcagcctgaagattttgcaacttattactgtcaacagcttaatagttaccctctcactttcggcggagggaccaaggtggagatcaaacgaactgtggctgcaccatctgtcttcatcttcccgccatctgatgagcagttgaaatctggaactgcctctgttgtgtgcctgctgaataacttctatcccagagaggccaaagtacagtggaaggtggataacgccctccaatcgggtaactcccaggagagtgtcacagagcaggacagcaaggacagcacctacagcctcagcagcaccctgacgctgagcaaagcagactacgagaaacacaaagtctacgcctgcgaagtcacccatcagggcctgagttcaccggtgacaaagagcttcaacaggggagagtgtggtaccgcttctactgccaccactggtcctgctcctactgaatcccctgctccgggtccttctggtgctcctggctctactggtcctggtgagccgagtcctagtgaagccaccactcctgctcctggtactccgtctcctacttccggccctgagggtgctaccggtgaaggtgctgccggcgagcctccgccttctggtactggtcctgctgctgcttctcctggtggcccgcctggtgaaactgccagtggtcctgctagtactggtggcaccggttctactgctactcctacttcctctgctgagtctccggccggtactgaacctagtagtggtcctgaggaaccttctgaggaaccggctactgaggctgctggcggtactactaccgaagcctccggtactactggtacttctgagaccgcttctcctgaagaggaagctcctagtgctagtgccactcctggcgagactggtactccggaacctggtgctcctggtactcctccgactggcgctggttcttccgagcctgctggttctggtggctctggtagtactcctgccagtgaggcttcttcctctcctgcttctactgctggtagtagtaccgccggtgaggaaccgcctccttaataaggcgcgcctaaccatctatttcaaggaacagtcttaatgaaaaagcttttattcatgatcccgttagttgtaccgttcgtggcccagccggccatggccgaagttcaattgttagagtctggtggcggtcttgttcagcctggtggttctttacgtctttcttgcgctgcttccggattcactttctctcattaccttatgacttgggttcgccaagctcctggtaaaggtttggagtgggtttcttatatctctccttctggtggccatactatttatgctgactccgttaaaggtcgcttcactatctctagagacaactctaagaatactctctacttgcagatgaacagcttaagggctgaggacacggccgtgtattactgtgcgagagtggcccgggggatagcagctcgatcgcgaaccagctactttgactactggggccagggaaccctggtcaccgtctcaagcgcctccaccaagggcccatcggtcttcccgctagcaccctcctccaagagcacctctgggggcacagcggccctgggctgcctggtcaaggactacttccccgaaccggtgacggtgtcgtggaactcaggcgccctgaccagcggcgtccacaccttcccggctgtcctacagtctagcggactctactccctcagcagcgtagtgaccgtgccctcttctagcttgggcacccagacctacatctgcaacgtgaatcacaagcccagcaacaccaaggtggacaagaaagttgagcccaaatcttgtgcggccgcttctcctgctactgcttccgcttctactgccccggctactgctacccctgagtctgctgaaggcgccactactgagactcctaccactgaaactcctgctgagagtgctagtggtccgcctgctccttctgaatccgccactgaggaatctggtgaggcttctaccagtagtactgctgaagagggtcctgctgaaccgggctctcctgcccctactcctgctgctactccggctgagacctcctctgaacctcctgaggaacctggtggtgccggtactccggctggcactactaccggtgctgagactgaatctgctactgagggtggtgccagtagtgctcctgcttctcctactggcggtgctccttcctctggtgaaaccactactgagggtggcccggccggtcctgctcctgctactgctgcccctaccggtggtggcgctggtggtgaaggttctgctggcggtggtactggtgaggaaggcggtggtggtgctccggagggcagtggtggtggtcctgaaggccctactcctgccactgaggctagtccggaaggtgctcctcctggttctacctccacttctggtcctggcgaggctgcctctccgactagtagtcctggttaatgataaaacgcgtgatgagaattcactggccgtcgttttacaacgtcgtgactgggaaaaccctggcgttacccaacttaatcgccttgcagcacatccccctttcgccagctggcgtaatagcgaagaggcccgcaccgatcgcccttcccaacagttgcgcagcctgaatggcgaatggcgcctgatgcggtattttctccttacgcatctgtgcggtatttcacaccgcatacgtcaaagcaaccatagtacgcgccctgtagcggcgcattaagcgcggcgggtgtggtggttacgcgcagcgtgaccgctacacttgccagcgccttagcgcccgctcctttcgctttcttcccttcctttctcgccacgttcgccggctttccccgtcaagctctaaatcgggggctccctttagggttccgatttagtgctttacggcacctcgaccccaaaaaacttgatttgggtgatggttcacgtagtgggccatcgccctgatagacggtttttcgccctttgacgttggagtccacgttctttaatagtggactcttgttccaaactggaacaacactcaactctatctcgggctattcttttgatttataagggattttgccgatttcggtctattggttaaaaaatgagctgatttaacaaaaatttaacgcgaattttaacaaaatattaacgtttacaattttatggtgcagtctcagtacaatctgctctgatgccgcatagttaagccagccccgacacccgccaacacccgctgacgcgccctgacgggcttgtctgctcccggcatccgcttacagacaagctgtgaccgtctccgggagctgcatgtgtcagaggttttcaccgtcatcaccgaaacgcgcga

SEQ ID NO: 2475 - protein, 37 aa, Homo sapiens
GPGGGGGPGGGGGPGGGGPGGGGGGGPGGGGGGPGGG

SEQ ID NO: 2476 - protein, 33 aa, Homo sapiens
GAGGGGGGGGGGGGGSGGGGGGGGAGAGGAGAG

SEQ ID NO: 2477 - protein, 32 aa, Homo sapiens
GGGSGSGGAGGGSGGGSGSGGGGGGAGGGGGG

SEQ ID NO: 2478 - protein, 27 aa, Homo sapiens
GDGGGAGGGGGGGGSGGGGSGGGGGGG

SEQ ID NO: 2479 - protein, 25 aa, Homo sapiens
GSGSGSGGGGGGGGGGGGSGGGGGG

SEQ ID NO: 2480 - protein, 23 aa, Homo sapiens
GGGRGGRGGGRGGGGRGGGRGGG

SEQ ID NO: 2481 - protein, 33 aa, Homo sapiens; identical to SEQ ID NO: 2476

SEQ ID NO: 2482 - protein, 32 aa, Homo sapiens; identical to SEQ ID NO: 2477

SEQ ID NO: 2483 - protein, 27 aa, Homo sapiens
GDGGGAGGGGGGGGSGGGGSGGGGGGG

SEQ ID NO: 2484 - protein, 21 aa, Homo sapiens
GSGGSGGSGGGPGPGPGGGGG

SEQ ID NO: 2485 - protein, 18 aa, Homo sapiens
GEGGGGGGEGGGAGGGSG

SEQ ID NO: 2486 - protein, 12 aa, Homo sapiens
GGGGGGGGDGGG

SEQ ID NO: 2487 - protein, 46 aa, Homo sapiens
GGGSGSGGAGGGSGGGSGSGGGGGGAGGGGGGSSGGGSGTAGGHSG

SEQ ID NO: 2488 - protein, 37 aa, Homo sapiens; identical to SEQ ID NO: 2475

SEQ ID NO: 2489 - protein, 35 aa, Homo sapiens
GGSGAGGGGGGGGGGGSGSGGGGSTGGGGGTAGGG

SEQ ID NO: 2490 - protein, 33 aa, Homo sapiens; identical to SEQ ID NO: 2476

SEQ ID NO: 2491 - protein, 33 aa, Homo sapiens; identical to SEQ ID NO: 2476

SEQ ID NO: 2492 - protein, 33 aa, Homo sapiens; identical to SEQ ID NO: 2476

SEQ ID NO: 2493 - protein, 32 aa, Homo sapiens
GHPGSGSGSGGGGGGGGGGGGSGGGGGGAPGG

SEQ ID NO: 2494 - protein, 31 aa, Homo sapiens
GGGGSGGGGGGGGGGGGGGSGSTGGGGSGAG

SEQ ID NO: 2495 - protein, 31 aa, Homo sapiens
GGRGRGGRGRGSRGRGGGGTRGRGRGRGGRG

SEQ ID NO: 2496 - protein, 30 aa, Homo sapiens
GSGGSGGSGGGPGPGPGGGGGPSGSGSGPG

SEQ ID NO: 2497 - protein, 29 aa, Homo sapiens
GGGGGGGGGGGRGGGGRGGGRGGGGEGGG

SEQ ID NO: 2498 - protein, 28 aa, Homo sapiens
GGGGTGSSGGSGSGGGGSGGGGGGGSSG

SEQ ID NO: 2499 - protein, 27 aa, Homo sapiens
GDGGGAGGGGGGGGSGGGGSGGGGGGG

SEQ ID NO: 2500 - protein, 27 aa, Homo sapiens
GGGGGGGSGGGGGSGGGGSGGGRGAGG

SEQ ID NO: 2501 - protein, 27 aa, Homo sapiens
GGGAAGAGGGGSGAGGGSGGSGGRGTG

SEQ ID NO: 2502 - protein, 27 aa, Homo sapiens
GAGGGRGGGAGGEGGASGAEGGGGAGG

SEQ ID NO: 2503 - protein, 27 aa, Homo sapiens
GDGGGAGGGGGGGGSGGGGSGGGGGGG

SEQ ID NO: 2504 - protein, 26 aa, Homo sapiens
GGGGGGGGGGGGGGGGGGGGGGGEAG

SEQ ID NO: 2505 - protein, 26 aa, Homo sapiens
GGGGGGSAGGGSSGGGPGGGGGGAGG

SEQ ID NO: 2506 - protein, 25 aa, Homo sapiens
GGGGGPGGGGGGGPGGGGGPGGGGG

SEQ ID NO: 2507 - protein, 25 aa, Homo sapiens
GRGGAGSGGAGSGAAGGTGSSGGGG

SEQ ID NO: 2508 - protein, 25 aa, Homo sapiens
GGGGGGGGGGGSGGSGGGGGGGGGG

SEQ ID NO: 2509 - protein, 25 aa, Homo sapiens
GGSGGGRGGASGPGSGSGGPGGPAG

SEQ ID NO: 2510 - protein, 25 aa, Homo sapiens
GGHHGDRGGGRGGRGGRGGRGGRAG

SEQ ID NO: 2511 - protein, 25 aa, Homo sapiens
GSRGGGGGGGGGGGGGGGGAGAGGG

SEQ ID NO: 2512 - protein, 24 aa, Homo sapiens
GGRGGRGPGEPGGRGRAGGAEGRG

SEQ ID NO: 2513 - protein, 24 aa, Homo sapiens
GGGGGDAGGSGDAGGAGGRAGRAG

SEQ ID NO: 2514 - protein, 23 aa, Homo sapiens
GGGRGGRGGGRGGGGRGGGRGGG

SEQ ID NO: 2515 - protein, 23 aa, Homo sapiens
GGSGGGGGGSSGGRGSGGGSSGG

SEQ ID NO: 2516 - protein, 23 aa, Homo sapiens
GSGPGTGGGGSGSGGGGGGSGGG

SEQ ID NO: 2517 - protein, 23 aa, Homo sapiens
GARGGGSGGGGGGGGGGGGGGPG

SEQ ID NO: 2518 - protein, 23 aa, Homo sapiens
GGGGGGGGGGGGGGGGGGGGGDG

SEQ ID NO: 2519 - protein, 23 aa, Homo sapiens
GGTRGGTRGGTRGGDRGRGRGAG

SEQ ID NO: 2520 - protein, 23 aa, Homo sapiens
GGTRGGTRGGTRGGDRGRGRGAG

SEQ ID NO: 2521 - protein, 23 aa, Homo sapiens
GAGGGGGGGGGGGGGGAGGGGGG

SEQ ID NO: 2522 - protein, 23 aa, Homo sapiens
GGGRGGRGGGRGGGGRGGGRGGG

SEQ ID NO: 2523 - protein, 22 aa, Homo sapiens
GRGRGGGGGGGGGGGGGRGGGG

SEQ ID NO: 2524 - protein, 22 aa, Homo sapiens
GRGRGRGRGRGRGRGRGRGGAG

SEQ ID NO: 2525 - protein, 22 aa, Homo sapiens
GAGGGGGGGGGGGGGGGGGGGG

SEQ ID NO: 2526 - protein, 22 aa, Homo sapiens
GGGSGGGHSGGSGGGHSGGSGG

SEQ ID NO: 2527 - protein, 22 aa, Homo sapiens
GAGAGGGGGGGGAGGGGSAGSG

SEQ ID NO: 2528 - protein, 22 aa, Homo sapiens
GGPGTGSGGGGAGTGGGAGGPG

SEQ ID NO: 2529 - protein, 22 aa, Homo sapiens
GGGGGGGGGAGGAGGAGSAGGG

SEQ ID NO: 2530 - protein, 21 aa, Homo sapiens
GGDGGGSAGGGAGGGSGGGAG

SEQ ID NO: 2531 - protein, 21 aa, Homo sapiens
GGGGGGSGGGGGGGGGGGGGG

SEQ ID NO: 2532 - protein, 21 aa, Homo sapiens
GPGAGAGSGAGGSSGGGGGPG

SEQ ID NO: 2533 - protein, 21 aa, Homo sapiens
GGGGGGGGGGGSSGGGGSSGG

SEQ ID NO: 2534 - protein, 21 aa, Homo sapiens
GSGSGPGPGSGPGSGPGHGSG

SEQ ID NO: 2535 - protein, 21 aa, Homo sapiens
GPGPGPGPGPGPGPGPGPGPG

SEQ ID NO: 2536 - protein, 21 aa, Homo sapiens
GAGSGGGGAAGAGAGSAGGGG

SEQ ID NO: 2537 - protein, 21 aa, Homo sapiens
GAGSGGGGAAGAGAGSAGGGG

SEQ ID NO: 2538 - protein, 21 aa, Homo sapiens
GGGGGGGSGGGGGGSGGGGGG

SEQ ID NO: 2539 - protein, 21 aa, Homo sapiens
GRGRGRGRGRGRGRGRGRGRG

SEQ ID NO: 2540 - protein, 21 aa, Homo sapiens
GGGGGGGSGGSGGGGGSGGGG

SEQ ID NO: 2541 - protein, 21 aa, Homo sapiens
GGEEGGASGGGPGAGSGSAGG

SEQ ID NO: 2542 - protein, 21 aa, Homo sapiens
GSGSGPGPGSGPGSGPGHGSG

SEQ ID NO: 2543 - protein, 21 aa, Homo sapiens
GRGRGRGRGRGRGRGRGRGRG

SEQ ID NO: 2544 - protein, 21 aa, Homo sapiens
GGGGGGGGDGGGRRGRGRGRG

SEQ ID NO: 2545 - protein, 20 aa, Homo sapiens
GGPGGPGGGGAGGPGGAGAG

SEQ ID NO: 2546 - protein, 20 aa, Homo sapiens
GTGGGGSTGGGGGGGGSGHG

SEQ ID NO: 2547 - protein, 20 aa, Homo sapiens
GPAGAGGGGGGGGGGGGGGG

SEQ ID NO: 2548 - protein, 20 aa, Homo sapiens
GGTGGSSGSSGSGSGGGRRG

SEQ ID NO: 2549 - protein, 20 aa, Homo sapiens
GGTGGSSGSSGSGSGGGRRG

SEQ ID NO: 2550 - protein, 20 aa, Homo sapiens
GSGTGTTGSSGAGGPGTPGG

SEQ ID NO: 2551 - protein, 20 aa, Homo sapiens
GGSGGGAAGGGAGGAGAGAG

SEQ ID NO: 2552 - protein, 20 aa, Homo sapiens
GGSGGGAAGGGAGGAGAGAG

SEQ ID NO: 2553 - protein, 20 aa, Homo sapiens
GSSGGGGGGAGAAGGAGGAG

SEQ ID NO: 2554 - protein, 20 aa, Homo sapiens
GPGPSGGPGGGGGGGGGGGG

SEQ ID NO: 2555 - protein, 20 aa, Homo sapiens
GGGGGGGGGGGGGGAAGAGG

SEQ ID NO: 2556 - protein, 20 aa, Homo sapiens
GRGRGRGRGRGRGRGRGRGG

SEQ ID NO: 2557 - protein, 20 aa, Homo sapiens
GSAGGSSGAAGAAGGGAGAG

SEQ ID NO: 2558 - DNA, 327 bp, synthetic construct
  misc_feature 1..327: note = Synthetic polynucleotide
  source 1..327: mol_type = other DNA
caagacatccagatgacccagtctccaggcaccctgtctttgtctccaggggaaagagccaccctctcctgcaggaccagtcaatttgttaacagcaactacttagcctggtaccaacagacacctggccaggctcccaggctcctcatctatggtgcatccagcagggccactggcatcccagacaggttcagtggcactgggtatgggacagacttcactctcaccatcagcagactggagcctgaagattatggaacttactactgtcagcagagttccagaaccccgtggacgttcggccaagggaccagagtggaaatcaaa

SEQ ID NO: 2559 - DNA, 324 bp, synthetic construct; identical to SEQ ID NO: 2418
  misc_feature 1..324: note = Synthetic polynucleotide
  source 1..324: mol_type = other DNA

SEQ ID NO: 2560 - protein, 109 aa, synthetic construct; identical to SEQ ID NO: 1142
  REGION 1..109: note = Synthetic polypeptide

SEQ ID NO: 2561 - protein, 108 aa, synthetic construct; identical to SEQ ID NO: 2388
  REGION 1..108: note = Synthetic polypeptide

SEQ ID NO: 2562 - DNA, 375 bp, synthetic construct; identical to SEQ ID NO: 2432
  misc_feature 1..375: note = Synthetic polynucleotide
  source 1..375: mol_type = other DNA

SEQ ID NO: 2563 - DNA, 375 bp, synthetic construct
  misc_feature 1..375: note = Synthetic polynucleotide
  source 1..375: mol_type = other DNA
gaagttcaattgttagagtctggtggcggtcttgttcagcctggtggttctttacgtctttcttgcgctgcttccggattcactttctctcattaccttatgacttgggttcgccaagctcctggtaaaggtttggagtgggtttcttatatctctccttctggtggccatactatttatgctgactccgttaaaggtcgcttcactatctctagagacaactctaagaatactctctacttgcagatgaacagcttaagggctgaggacacggccgtgtattactgtgcgagagtggcccgggggatagcagctcgatcgcgaaccagctactttgactactggggccagggaaccctggtcaccgtctcaagc

SEQ ID NO: 2564 - protein, 125 aa, synthetic construct; identical to SEQ ID NO: 2403
  REGION 1..125: note = Synthetic polypeptide

SEQ ID NO: 2565 - protein, 125 aa, synthetic construct; identical to SEQ ID NO: 2403
  REGION 1..125: note = Synthetic polypeptide

SEQ ID NO: 2566 - protein, 19 aa, synthetic construct
  REGION 1..19: note = Synthetic peptide
LVTNEECQKRYQDYKITQQ

SEQ ID NO: 2567 - protein, 5 aa, synthetic construct
  REGION 1..5: note = Synthetic peptide
SWGDI

SEQ ID NO: 2568 - protein, 8 aa, synthetic construct
  REGION 1..8: note = Synthetic peptide
HDIALIKL

SEQ ID NO: 2569 - protein, 14 aa, synthetic construct
  REGION 1..14: note = Synthetic peptide
WVTGWGFSKEKGEI

SEQ ID NO: 2570 - protein, 15 aa, synthetic construct
  REGION 1..15: note = Synthetic peptide
TPFSQIKEIIIHQNY

SEQ ID NO: 2571 - protein, 10 aa, synthetic construct
  REGION 1..10: note = Synthetic peptide
ACKGDSGGPL

SEQ ID NO: 2572 - protein, 16 aa, synthetic construct
  REGION 1..16: note = Synthetic peptide
AHCFDGLPLQDVWRIY

SEQ ID NO: 2573 - protein, 638 aa, Homo sapiens [sequence omitted]

SEQ ID NO: 2574 - protein, 636 aa, Bos taurus
MIALRQAAYFICLFATVSCGCLTQLYHNIFFRGGDVSAMYTPDAQYCQLMCTFHPRCLLFSFLPENSTSDADKRFGCFLKDSVTGTLPRVSRTGAISGHSLKRCGHQISACHRSIYKGIDMRGVNFNASKVRSAKECQERCTNNIHCQFFTYATKTFFSAEYRNTCLLKRSPQGTPTRIKVLSDVESGFSLKACGNSKIGCRVDIFQHSAFSDVDVAGIIAPDAFVCRTICTYHPSCLFFTFYTNAWKTDSQRNVCFLKTSQSGSPSSPTPQENAISGYSLLTCKQTLPGTEPCHSKIYPQVAFEGEELHVTFVKGVDGCQETCTKMIRCQFFTYSLFPEDCRGEKCKCSLRLSLDGSPTNITYGTQASSGYSLRLCKRGDSRVCTTKRTRIVGGTNASWGEWPWQVSLQVKQRAQSHLCGGSIIGRQWVLTAAHCFDGLLLSNIWRIYGGILNLSEITTETSFSQIKEIIVHPNYKISEGSHDIALIKLEAPLNFTDLQKAICLPSKDDTKPVYTDCWITGWGFTEEKGKIQNTLQKANIPLISNEECQKSYRDYKITKQMICAGYKEGGKDACKGDSGGPLVCQHEETWHLVGITSWGEGCARREQPGVYTKVAEYVDWILEKTQDSHGQPLRK

SEQ ID NO: 2575 - protein, 638 aa, Mus musculus; identical to SEQ ID NO: 4

SEQ ID NO: 2576 - protein, 638 aa, Rattus norvegicus
MILFKQVGYFVSLFATVSCGCLSQLYANTFFRGGDLAAIYTPDAQHCQKMCTFHPRCLLFSFLAVSPTKETDKRFGCFMKESITGTLPRIHRTGAISGHSLKQCGHQLSACHQDIYEGLDMRGSNFNISKTDSIEECQKLCTNNIHCQFFTYATKAFHRPEYRKSCLLKRSSSGTPTSIKPVDNLVSGFSLKSCALSEIGCPMDIFQHFAFADLNVSQVVTPDAFVCRTVCTFHPNCLFFTFYTNEWETESQRNVCFLKTSKSGRPSPPIIQENAVSGYSLFTCRKARPEPCHFKIYSGVAFEGEELNATFVQGADACQETCTKTIRCQFFTYSLLPQDCKAEGCKCSLRLSTDGSPTRITYEAQGSSGYSLRLCKVVESSDCTTKINARIVGGTNSSLGEWPWQVSLQVKLVSQNHMCGGSIIGRQWILTAAHCFDGIPYPDVWRIYGGILNLSEITNKTPFSSIKELIIHQKYKMSEGSYDIALIKLQTPLNYTEFQKPICLPSKADTNTIYTNCWVTGWGYTKERGETQNILQKATIPLVPNEECQKKYRDYVITKQMICAGYKEGGIDACKGDSGGPLVCKHSGRWQLVGITSWGEGCARKEQPGVYTKVAEYIDWILEKIQSSKERALETSPA

SEQ ID NO: 2577 - protein, 643 aa, Sus scrofa
MEVIVLFRIISFRQAVYFMCLFAAVSCGCLPQLHKNTFFRGGDVSAMYTPSARHCQMMCTFHPRCLLFSFLPADSTSVTDKRFGCFLKDSVTGMLPRVLRENAISGHSLKQCGHQIRACHRDIYKGIDMRGVNFNVSKVKTVEECQERCTNSIHCLFFTYATQAFNNAEYRNNCLLKHSPGGTPTSIKVLANVESGFSLKPCADSEIGCHMDIFQHLAFSDVDVARVIAPDAFVCRTICTYHPNCLFFTFYTNAWKIESQRNVCFLKTSHSGTPSFPTPQENAISGYSLLTCKQTLPEPCHSKIYSEVDFEGEELNVTFVQGANLCQETCTKTIRCQFFTYSLHPEDCRGEKCKCSLRLSSDGSPTKITHGMRASSGYSLRLCRSGDHSACATKANTRIVGGTDSFLGEWPWQVSLQAKLRAQNHLCGGSIIGHQWVLTAAHCFDGLSLPDIWRIYGGILNISEITKETPFSQVKEIIIHQNYKILESGHDIALLKLETPLNYTDFQKPICLPSRDDTNVVYTNCWVTGWGFTEEKGEIQNILQKVNIPLVSNEECQKSYRDHKISKQMICAGYKEGGKDACKGESGGPLVCKYNGIWHLVGTTSWGEGCARREQPGVYTKVIEYMDWILEKTQDDDGQSWMK

SEQ ID NO: 2578 - protein, 629 aa, Xenopus laevis
MACYYSSLLFLLLFTLVSGGCISELYQDIYWQGGDLRSVFAPDVEYCQLVCTFSPRCLMFSYLPASWPKENERFACYLKESATNMLPKVTLTGVISGHSLKNCKSKINVCRDKNFPGIDMIGTNYNVTSTANVQQCKEGCTNDIYCQYFTYVTQEFHSAQLRNRCYFKYSGKGMPTRIRLLDNVISGFSLKACGKSSLGCQNDLFQNMELPGETLTRVFAPDVLTCQKICTFYPNCLFFTFFKKDSKDPLQRNVCYVRTSTKGIPDEVINKEHTISGFSLLSCKFSPSVCPLTMLSDSEFLGDELLVEEVSGEKECQQACTNNIRCQFFTYGPVKSGCLEKKCKCHMKISSNGLPTGIRHGNGGISGFSLRLCKMKSVKGCGEPSEHANRIVGGTDSVLGEWPWQVSMHLRLGASYKKHACGGSIISNQWIVTAAHCVALYPQPQMWIIYSGFVRILNITKSTPFSELEKIIIHPHYTGAGNGSDIALLKLKTPIVFNDHQKAICLPPSEATLVLPNSCWITGWGYTEETGSPGNVLQKAEVPPISTEECQGSYVETRIDKKVLCAGYKSGKIDACKGDSGGPLVCEVDEIWYLTGITSWGEGCARPGKPGVYTRVSTFTNWILEHTKL

SEQ ID NO: 2579 - protein, 641 aa, Macaca mulatta
MILFKQATYFISLFATVSCGCLTQLYENAFFRGGDVASMYTPNAQHCQMMCTFHPRCLLFSFLPASSINDMEKRFGCFLKDSVTGTLPKVRRAGAISGHSLKQCGHQISACHRDIYKGIDMRGVNFNVSKVSSVEECQKRCTNNIRCQFFSYATQTFHNAEYRNTCLLKHSPGGTPTTIKVLNNVESGFSLKPCALSEIGCHMNIFQHLAFSDVDVARVLAPDAFVCRTICTYHPSCLFFTFYTNAWKIESQRRVCMLAGSQDGAAHSSLGDARLRLKQKNKNKQTKKNTLPEPCHSKIYPGVDFGGEELNVTFVKGVNVCQETCTKMIRCQFFTYSLLPEDCKEEKCKCFLRLSSDGSPTRITYGTQGSSGYSLRLCNTGDSSVCTTKTSSRIVGGTNSSWGEWPWQVSLQVKLMAQRHLCGGSLIGHQWVLTAAHCFDGLPLPDVWRIYSGILNLSDITKETPFSQIKEIIIHQNYRISEGNHDIALIKLQAPLNYTEFQKPICLPSKGDTNTIYTNCWVTGWGFSKEKGEIQDILQKVNIPLVTNEECQKRYQDYKITQRMVCAGYKEGGKDACKGDSGGPLACKHNGMWRLVGITSWGEGCARREQPGVYTKVAEYMDWILEKTQSSDGNARMQAPA

SEQ ID NO: 2580 - protein, 629 aa, Canis lupus
  source 1..629: note = familiaris
MLIKLPLKWVSQGCLTQLYKNTFFKGGDLTAMYTPNAHHCQMMCTFHPRCLLFSFLPESSTNDVNKRFGCFLKDSVTETLPRMSWTSAISGHSLKQCGHQISACHRDIHKGIDMRGVNFNVSKVKSVEECQKKCTNSIHCQFFTYATETFYNVEYRNSCLLKNGPGGTPSSIKVLADVVSGFSLKSCALSEIGCHMNIFQHLAFSDVDVARVVTPDAFVCQTICTYHPNCLFFTFYTKAWHLEPQRNVCFLKTSKSGTPSSPTSQKNAMSGYSLLTCKKALPEPCHSKIYSGVDFEGEELNVTFAEGVNACQETCTKMIRCQFFTYSLRPEDCRGEKCKCSLRLSLDGSPTGMTYGTRVSSGYSLRLCKSGDSSVCTTKTSTRIVGGTNSSWGEWPWQVSLQVKLRAQSHLCGGSIIGRQWVLTAAHCFDELSLPDVWRIYSGILNLSEITKETPFSQIKEIIIHQNYKITDGGSYDIALIKLEAPLNYTEFQKPICLPSKDDTNTTYTNCWVTGWGFTKERGEIQNSLQKANIPLVPNEECQKKYRDYEVNKQMICAGYKEGGKDACKGDSGGPLVCKHNGNWHLVGITSWGEGCGRREQPGVYTKVAEYVDWILEKTQVGDGHAGLG

SEQ ID NO: 2581 - protein, 14 aa, synthetic construct
  REGION 1..14: note = Synthetic peptide
GGLLLWFRELKSNY

1-8. (canceled)

9. An isolated antibody or functional fragment thereof, comprising:
(i) a heavy chain variable region (VH) comprising a heavy chain complementarity determining region (HC CDR) 1 comprising an amino acid sequence WYSMV (SEQ ID NO: 22), a HC CDR2 comprising an amino acid sequence SISPSGGLTNYADSVKG (SEQ ID NO: 23), a HC CDR3 comprising an amino acid sequence HTAARPFYYYYMDV (SEQ ID NO: 24) and a light chain variable region (VL) comprising a light chain (LC) CDR1 comprising an amino acid sequence TGTNSDVGNYNLVS (SEQ ID NO: 19), a LC CDR2 comprising an amino acid sequence EVNKRPS (SEQ ID NO: 20), and a LC CDR3 sequence comprising an amino acid sequence CSYAGNRNFYV (SEQ ID NO: 21);
(ii) a VH comprising a HC CDR1 comprising an amino acid sequence WYLMI (SEQ ID NO: 28), a HC CDR2 comprising an amino acid sequence YIYPSGGFTYYADSVKG (SEQ ID NO: 29), a HC CDR3 comprising an amino acid sequence TEGPLSWGYGMDV (SEQ ID NO: 30) and a VL comprising a light chain (LC) CDR1 comprising an amino acid sequence SGDKLGDKYAC (SEQ ID NO: 55), a LC CDR2 comprising an amino acid sequence QDSKRPS (SEQ ID NO: 56), and a LC CDR3 sequence comprising an amino acid sequence QAWDSSTGV (SEQ ID NO: 57);
(iii) a VH comprising a HC CDR1 comprising an amino acid sequence TYFML (SEQ ID NO: 34), a HC CDR2 comprising an amino acid sequence SIYPSGGNTVYADSVKG (SEQ ID NO: 35), a HC CDR3 comprising an amino acid sequence AASPVRNYYYYGMDV (SEQ ID NO: 36) and a VL comprising a light chain (LC) CDR1 comprising an amino acid sequence SGDKLGNKYAY (SEQ ID NO: 31), a LC CDR2 comprising an amino acid sequence QDNNRPS (SEQ ID NO: 32), and a LC CDR3 sequence comprising an amino acid sequence QAWDSRTVV (SEQ ID NO: 33);
(iv) a VH comprising a HC CDR1 comprising an amino acid sequence FYNMN (SEQ ID NO: 40), a HC CDR2 comprising an amino acid sequence SISPSGGETNYADSVKG (SEQ ID NO: 41), a HC CDR3 comprising an amino acid sequence GGGAYRNNWWGGFDI (SEQ ID NO: 42) and a VL comprising a light chain (LC) CDR1 comprising an amino acid sequence RASQSISVYLN (SEQ ID NO: 37), a LC CDR2 comprising an amino acid sequence GASNLQF (SEQ ID NO: 38), and a LC CDR3 sequence comprising an amino acid sequence QQTFSLFT (SEQ ID NO: 39);
(v) a VH comprising a HC CDR1 comprising an amino acid sequence RYEMY (SEQ ID NO: 100), a HC CDR2 comprising an amino acid sequence SISSSGGPTAYADSVKG (SEQ ID NO: 101), a HC CDR3 comprising an amino acid sequence GTPKWELLLRSIYIENAFDI (SEQ ID NO: 102) and a VL comprising a light chain (LC) CDR1 comprising an amino acid sequence SGSSSNIGSNTVS (SEQ ID NO: 97), a LC CDR2 comprising an amino acid sequence NDHRRPS (SEQ ID NO: 98), and a LC CDR3 sequence comprising an amino acid sequence SAWDDSLNGVV (SEQ ID NO: 99);
(vi) a VH comprising a HC CDR1 comprising an amino acid sequence FYAMH (SEQ ID NO: 106), a HC CDR2 comprising an amino acid sequence GIVPSGGRTHYADSVKG (SEQ ID NO: 107), a HC CDR3 comprising an amino acid sequence DSSGSPNPLFDY (SEQ ID NO: 108) and a VL comprising a light chain (LC) CDR1 comprising an amino acid sequence RSSQSLSDDGNTYLD (SEQ ID NO: 103), a LC CDR2 comprising an amino acid sequence TLSYRAS (SEQ ID NO: 104), and a LC CDR3 sequence comprising an amino acid sequence MQGTHWPPT (SEQ ID NO: 105);
(vii) a VH comprising a HC CDR1 comprising an amino acid sequence YYEMD (SEQ ID NO: 112), a HC CDR2 comprising an amino acid sequence GISSSGGHTAYADSVKG (SEQ ID NO: 113), a HC CDR3 comprising an amino acid sequence ERRSSSRARYYYGMDV (SEQ ID NO: 114) and a VL comprising a light chain (LC) CDR1 comprising an amino acid sequence RSSLSLLHSNGYNYLD (SEQ ID NO: 109), a LC CDR2 comprising an amino acid sequence LSSTRAS (SEQ ID NO: 110), and a LC CDR3 sequence comprising an amino acid sequence MQPLETPPT (SEQ ID NO: 111);
(viii) a VH comprising a HC CDR1 comprising an amino acid sequence DYRMQ (SEQ ID NO: 118), a HC CDR2 comprising an amino acid sequence VIVPSGGNTMYADSVKG (SEQ ID NO: 119), a HC CDR3 comprising an amino acid sequence GGPGSSIAARRAPTGYYGMDV (SEQ ID NO: 120) and a VL comprising a light chain (LC) CDR1 comprising an amino acid sequence SGNNSNFGSNTVT (SEQ ID NO: 115), a LC CDR2 comprising an amino acid sequence SDSRRPS (SEQ ID NO: 116), and a LC CDR3 sequence comprising an amino acid sequence AAWDDSLNGV (SEQ ID NO: 117);
(ix) a VH comprising a HC CDR1 comprising an amino acid sequence YYHMS (SEQ ID NO: 130), a HC CDR2 comprising an amino acid sequence VISPSGGSTKYADSVKG (SEQ ID NO: 131), a HC CDR3 comprising an amino acid sequence GGSSDYAWGSYRRPYYFDY (SEQ ID NO: 132) and a VL comprising a light chain (LC) CDR1 comprising an amino acid sequence RASQSVSSYLA (SEQ ID NO: 127), a LC CDR2 comprising an amino acid sequence DASNRAT (SEQ ID NO: 128), and a LC CDR3 sequence comprising an amino acid sequence QQRSNWPRGFT (SEQ ID NO: 129);
(x) a VH comprising a HC CDR1 comprising an amino acid sequence PYFMG (SEQ ID NO: 148), a HC CDR2 comprising an amino acid sequence GIGPSGGSTTYADSVKG (SEQ ID NO: 149), a HC CDR3 comprising an amino acid sequence EGPPYSSGWYRGLRQYHFDY (SEQ ID NO: 150) and VL comprising a light chain (LC) CDR1 comprising an amino acid sequence RASQSISSYLS (SEQ ID NO: 145), a LC CDR2 comprising an amino acid sequence AASSLQS (SEQ ID NO: 146), and a LC CDR3 sequence comprising an amino acid sequence QQSISIPRT (SEQ ID NO: 147); or
(xi) a VH comprising a HC CDR1 comprising an amino acid sequence DYAMK (SEQ ID NO: 160), a HC CDR2 comprising an amino acid sequence SISSSGGVTQYADSVKG (SEQ ID NO: 161), a HC CDR3 comprising an amino acid sequence EEDYSSSWYSRRFDYYYGMDV (SEQ ID NO: 162) and a VL comprising a light chain (LC) CDR1 comprising an amino acid sequence SGDKLGDKYVS (SEQ ID NO: 157), a LC CDR2 comprising an amino acid sequence QDTKRPS (SEQ ID NO: 158), and a LC CDR3 sequence comprising an amino acid sequence QAWDSSTYV (SEQ ID NO: 159).

10. The isolated antibody or functional fragment thereof of claim 9, wherein the antibody comprises:
(i) a heavy chain variable region (VH) comprising an amino acid sequence of amino acids 1-123 of SEQ ID NO: 232 having the amino acid sequence of EVQLLESGGGLVQPGGSLRLSCAASGFTFSWYSMVWVRQAPGKGLEWVSSISPSGGLTN YADSVKGRFTISRDNSKNTLYLQMNSLRAEDTAVYYCARHTAARPFYYYYMDVWGKG TTVTVSS and a light chain variable region (VL) comprising an amino acid sequence of
(SEQ ID NO: 231)
QSALTQPASVSGSPGQSITISCTGTNSDVGNYNLVSWYQQHPGEAPKLL
IYEVNKRPSGVSNRFSGSKSGNTASLTISGLQAEDEADYLCCSYAGNRN
FYVFGAGTKVTVL;
(ii) a VH comprising an amino acid sequence of amino acids 1-122 of SEQ ID NO: 234 having the amino acid sequence of EVQLLESGGGLVQPGGSLRLSCAASGFTFSWYLMIWVRQAPGKGLEWVSYIYPSGGFTY YADSVKGRFTISRDNSKNTLYLQMNSLRAEDMAVYYCARTEGPLSWGYGMDVWGQGT TVTVSS and a VL comprising an amino acid sequence of
(SEQ ID NO: 233)
QSELTQPPSVSVSPGQTASITCSGDKLGDKYACWYQQKPGQSPVLVIYQ
DSKRPSGIPERFSGSNSGNTATLTISGTQAMDEADYYCQAWDSSTGVFG
GGTKLTVL;
(iii) a VH comprising an amino acid sequence of amino acids 1-124 of SEQ ID NO: 236 having the amino acid sequence of EVQLLESGGGLVQPGGSLRLSCAASGFTFSTYFMLWVRQAPGKGLEWVSSIYPSGGNTV YADSVKGRFTISRDNSKNTLYLQMNSLRAEDTAVYYCARAASPVRNYYYYGMDVWGQ GTTVTVSS and VL comprising an amino acid sequence of
(SEQ ID NO: 235)
QCELTQPPSESVSPGQTANITCSGDKLGNKYAYWYQQKPGQSPVLVIYQ
DNNRPSGIPERFSGSNSGNTATLTISGTQAIDEANYYCQAWDSRTVVFG
GGTKLTVL;
(iv) a VH comprising an amino acid sequence of amino acids 1-124 of SEQ ID NO: 238 having the amino acid sequence of EVQLLESGGGLVQPGGSLRLSCAASGFTFSFYNMNWVRQAPGKGLEWVSSISPSGGETN YADSVKGRFTISRDNSKNTLYLQMNSLRAEDTAVYYCARGGGAYRNNWWGGFDIWGL GTMVTVSS and VL comprising an amino acid sequence of
(SEQ ID NO: 237)
QDIQMTQSPSSLSASVGDRVTITCRASQSISVYLNWYQHKPGKAPKLLI
YGASNLQFGVPSRFSGSGYGTDFTLTISSLQPEDFATYHCQQTFSLFTF
GGGTKVEIK;
(v) a VH comprising an amino acid sequence of amino acids 1-129 of SEQ ID NO: 258 having the amino acid sequence of EVQLLESGGGLVQPGGSLRLSCAASGFTFSRYEMYWVRQAPGKGLEWVSSISSSGGPTA YADSVKGRFTISRDNSKNTLYLQMNSLRAEDTAMYYCAKGTPKWELLLRSIYIENAFDI WGQGTMVTVSS and a VL comprising an amino acid sequence of
(SEQ ID NO: 257)
QSELTQPPSASETPGQRVTISCSGSSSNIGSNTVSWFQQLPGSAPRLLI
YNDHRRPSGVPDRFSGSKSGTSASLVISGLQSQDEADYYCSAWDDSLNG
VVFGGGTKLTVL;
(vi) a VH comprising an amino acid sequence of amino acids 1-121 of SEQ ID NO: 260 having the amino acid sequence of EVQLLESGGGLVQPGGSLRLSCAASGFTFSFYAMHWVRQAPGKGLEWVSGIVPSGGRTH YADSVKGRFTISRDNSKNTLYLQMNSLRAEDTAVYYCATDSSGSPNPLFDYWGQGTLVT VSS and a VL comprising an amino acid sequence of
(SEQ ID NO: 259)
QDIVMTQTPPSLPVNPGEPASISCRSSQSLSDDGNTYLDWYLQRPGQSP
QLLIHTLSYRASGVPDRFSGSGSGTDFTLKISRVEAEDVGVYYCMQGTH
WPPTFGQGTKVEIK;
(vii) a VH comprising an amino acid sequence of amino acids 1-125 of SEQ ID NO: 262 having the amino acid sequence of EVQLLESGGGLVQPGGSLRLSCAASGFTFSYYEMDWVRQAPGKGLEWVSGISSSGGHTA YADSVKGRFTISRDNSKNTLYLQMNSLRAEDTATYYCARERRSSSRARYYYGMDVWGQ GTTVTVSS and a VL comprising an amino acid sequence of
(SEQ ID NO: 261)
QDIQMTQSPLSLSVTPGEPASISCRSSLSLLHSNGYNYLDWYVQRPGQS
PQLLMYLSSTRASGVPDRFSGSGSGTDFTLEISRVEAEDVGVYYCMQPL
ETPPTFGGGTKVEIK;
(viii) a VH comprising an amino acid sequence of amino acids 1-130 of SEQ ID NO: 264 having the amino acid sequence of EVQLLESGGGLVQPGGSLRLSCAASGFTFSDYRMQWVRQAPGKGLEWVSVIVPSGGNT MYADSVKGRFTISRDNSKNTLYLQMNSLRAEDTAVYYCARGGPGSSIAARRAPTGYYG MDVWGQGTTVTVSS and a VL comprising an amino acid sequence of
(SEQ ID NO: 263)
QSVLIQPPSVSGIPGQRVTISCSGNNSNFGSNTVTWYQQLPGTAPKLLI
YSDSRRPSGVPDRFSGSRSDTSASLAISGLQSEDEAEYHCAAWDDSLNG
VFGGGTKLTVL;
(ix) a VH comprising an amino acid sequence of amino acids 1-128 of SEQ ID NO: 268 having the amino acid sequence of EVQLLESGGGLVQPGGSLRLSCAASGFTFSYYHMSWVRQAPGKGLEWVSVISPSGGSTK YADSVKGRFTISRDNSKNTLYLQMNSLRAEDTAVYYCARGGSSDYAWGSYRRPYYFDY WGQGTLVTVSSASTKGPSVFPLAPSSKS and a VL comprising an amino acid sequence of
(SEQ ID NO: 267)
QDIQMTQSPATLSLSPGERATLSCRASQSVSSYLAWYQQKPGQAPRLLI
YDASNRATGIPARFSGSGSGTDFTLTISSLEPEDFAVYYCQQRSNWPRG
FTFGPGTKVDIK;
(x) a VH comprising an amino acid sequence of amino acids 1-129 of SEQ ID NO: 274 having the amino acid sequence of EVQLLESGGGLVQPGGSLRLSCAASGFTFSPYFMGWVRQAPGKGLEWVSGIGPSGGSTT YADSVKGRFTISRDNSKNTLYLQMNSLRAEDTAVYYCAREGPPYSSGWYRGLRQYHFD YWGQGTLVTVSS and a VL comprising an amino acid sequence of QDIQMTQSPSSLSASVGDRVTITCRASQSISSYLSWYQQRPGKAPNLLIYAASSLQSGVP SRFSGSGSGTDFTLTISSLQPEDFATYYCQQSISIPRTFGQGTKVEVK (SEQ ID NO: 273); or
(xi) a VH comprising an amino acid sequence of amino acids 1-130 of SEQ ID NO: 278 having the amino acid sequence of EVQLLESGGGLVQPGGSLRLSCAASGFTFSDYAMKWVRQAPGKGLEWVSSISSSGGVTQ YADSVKGRFTISRDNSKNTLYLQMNSLRAEDTAVYYCAREEDYSSSWYSRRFDYYYGM DVWGQGTTVTVSS and a VL comprising an amino acid sequence of
(SEQ ID NO: 277)
QSALTQPPSVSVSPGQTASITCSGDKLGDKYVSWYQQRPGQSPVLVIYQ
DTKRPSGIPERFSGSNSGNTATLTISGTQAVDEADYYCQAWDSSTYVFG
GGTKVTVL.

11. The isolated antibody or functional fragment thereof of claim 9, wherein the antibody is a full-length antibody.

12. The isolated antibody or functional fragment thereof of claim 9, wherein the antibody is an IgG antibody.

13. The isolated antibody or functional fragment thereof of claim 9, wherein the antibody is a soluble Fab (sFab).

14. A nucleic acid(s) encoding the isolated antibody or functional fragment thereof of claim 9.

15. A vector(s) comprising the nucleic acid(s) of claim 14.

16. The vector(s) of claim 15, wherein the vector(s) is an expression vector(s).

17. A host cell comprising the nucleic acid(s) of claim 14.

18. The host cell of claim 17, wherein the cell is a mammalian cell.

19. The host cell of claim 18, wherein the mammalian cell is a Chinese Hamster Ovarian (CHO) cell.

20. A method of producing an antibody comprising,
culturing the host cell of claim 17 in a culture medium, thereby producing the antibody.

21. The method of claim 20, further comprising purifying the antibody from the culture medium.

22. A pharmaceutical composition comprising the isolated antibody or functional fragment thereof of claim 9 and a pharmaceutically acceptable carrier.

23. A method of detecting plasma kallikrein in a subject, the method comprising:
administering the isolated antibody or functional fragment thereof of claim 9; and
detecting an interaction between the antibody or functional fragment thereof and plasma kallikrein in the subject.

24. The method of claim 23, wherein the antibody or functional fragment thereof comprises a detectable label.

25. A method of detecting plasma kallikrein in a sample, the method comprising contacting the sample with the isolated antibody or functional fragment thereof of claim 9; and detecting an interaction between the antibody or functional fragment thereof and plasma kallikrein in the sample, if present.

26. The method of claim 25, wherein the sample is obtained from a subject.

27. The method of claim 26, wherein the sample is a biopsy sample.
